(19) United States
(12) Patent Application Publication
(10) Pub. No.: US 2004/0010134 A1
(43) Pub. Date: Jan. 15, 2004

(54) Albumin fusion proteins

(76) Inventors: Craig A. Rosen, Laytonsville, MD (US); William A. Haseltine, Washington, DC (US)

Correspondence Address: HUMAN GENOME SCIENCES INC, 9410 KEY WEST AVENUE, ROCKVILLE, MD, 20850

(21) Appl. No.: 09/833,245

(22) Filed: Apr. 12, 2001

Related U.S. Application Data
(60) Provisional application No. 60/256,931, filed on Dec. 21, 2000.
(60) Provisional application No. 60/199,384, filed on Apr. 25, 2000.
(60) Provisional application No. 60/229,358, filed on Apr. 12, 2000.

(51) Int. Cl. C07H 21/04; C12P 21/04; C12P 21/02; C07K 14/765; A61K 38/38

(52) U.S. Cl. 536/23.5; 530/363; 514/12; 435/69.7; 435/320.1; 435/325

(57) ABSTRACT

The present invention encompasses albumin fusion proteins. Nucleic acid molecules encoding the albumin fusion proteins of the invention are also encompassed by the invention, as are vectors containing these nucleic acids, host cells transformed with these nucleic acids vectors, and methods of making the albumin fusion proteins of the invention and using these nucleic acids, vectors, and/or host cells. Additionally the present invention encompasses pharmaceutical compositions comprising albumin fusion proteins and methods of treating, preventing, or ameliorating diseases, disordrs or conditions using albumin fusion proteins of the invention.

[0001] This application claims the benefit of priority under 35 U.S.C. §119(e) based on the following U.S. provisional applications No. 60/229,358 filed on Apr. 12, 2000; No. 60/199,384 filed on Apr. 25, 2000; and No. 60/256,931 filed on Dec. 21, 2000. Each of the provisional applications is hereby incorporated by reference in its entirety.

### BACKGROUND OF THE INVENTION

[0002] The invention relates generally to Therapeutic proteins (including, but not limited to, a polypeptide, antibody, or peptide, or fragments and variants thereof) fused to albumin or fragments or variants of albumin. The invention further relates to Therapeutic proteins (including, but not limited to, a polypeptide, antibody, or peptide, or fragments and variants thereof) fused to albumin or fragments or variants of albumin, that exhibit extended shelf-life and/or extended or therapeutic activity in solution. These fusion proteins are herein collectively referred to as “albumin fusion proteins of the invention.” The invention encompasses therapeutic albumin fusion proteins, compositions, pharmaceutical compositions, formulations and kits. Nucleic acid molecules encoding the albumin fusion proteins of the invention are also encompassed by the invention, as are vectors containing these nucleic acids, host cells transformed with these nucleic acids vectors, and methods of making the albumin fusion proteins of the invention using these nucleic acids, vectors, and/or host cells.

[0003] The invention is also directed to methods of in vitro stabilizing a Therapeutic protein via fusion or conjugation of the Therapeutic protein to albumin or fragments or variants of albumin.

[0004] Human serum albumin (HSA, or HA), a protein of 585 amino acids in its mature form (as shown in FIG. 15 or in SEQ ID NO:18), is responsible for a significant proportion of the osmotic pressure of serum and also functions as a carrier of endogenous and exogenous ligands. At present, HA for clinical use is produced by extraction from human blood. The production of recombinant HA (rHA) in microorganisms has been disclosed in EP 330 451 and EP 361 991.

[0005] The role of albumin as a carrier molecule and its inert nature are desirable properties for use as a carrier and transporter of polypeptides in vivo. The use of albumin as a component of an albumin fusion protein as a carrier for various proteins has been suggested in WO 93/15199, WO 93/15200, and EP 413 622. The use of N-terminal fragments of HA for fusions to polypeptides has also been proposed (EP 399 666). Fusion of albumin to the Therapeutic protein may be achieved by genetic manipulation, such that the DNA coding for HA, or a fragment thereof, is joined to the DNA coding for the Therapeutic protein. A suitable host is then transformed or transfected with the fused nucleotide sequences, so arranged on a suitable plasmid as to express a fusion polypeptide. The expression may be effected in vitro from, for example, prokaryotic or eukaryotic cells, or in vivo e.g. from a transgenic organism.

[0006] Therapeutic proteins in their native state or when recombinantly produced, such as interferons and growth hormones, are typically labile molecules exhibiting short shelf-lives, particularly when formulated in aqueous solutions. The instability in these molecules when formulated for administration dictates that many of the molecules must be lyophilized and refrigerated at all times during storage, thereby rendering the molecules difficult to transport and/or store. Storage problems are particularly acute when pharmaceutical formulations must be stored and dispensed outside of the hospital environment. Many protein and peptide drugs also require the addition of high concentrations of other protein such as albumin to reduce or prevent loss of protein due to binding to the container. This is a major concern with respect to proteins such as IFN. For this reason, many Therapeutic proteins are formulated in combination with large proportion of albumin carrier molecule (100-1000 fold excess), though this is an undesirable and expensive feature of the formulation.

[0007] Few practical solutions to the storage problems of labile protein molecules have been proposed. Accordingly, there is a need for stabilized, long lasting formulations of proteinaceous therapeutic molecules that are easily dispensed, preferably with a simple formulation requiring minimal post-storage manipulation.

### SUMMARY OF THE INVENTION

[0008] The present invention is based, in part, on the discovery that Therapeutic proteins may be stabilized to extend the shelf-life, and/or to retain the Therapeutic protein's activity for extended periods of time in solution, in vitro and/or in vivo, by genetically or chemically fusing or conjugating the Therapeutic protein to albumin or a fragment (portion) or variant of albumin, that is sufficient to stabilize the protein and/or its activity. In addition it has been determined that the use of albumin-fusion proteins or albumin conjugated proteins may reduce the need to formulate protein solutions with large excesses of carrier proteins (such as albumin, unfused) to prevent loss of Therapeutic proteins due to factors such as binding to the container.

[0009] The present invention encompasses albumin fusion proteins comprising a Therapeutic protein (e.g., a polypeptide, antibody, or peptide, or fragments and variants thereof) fused to albumin or a fragment (portion) or variant of albumin. The present invention also encompasses albumin fusion proteins comprising a Therapeutic protein (e.g., a polypeptide, antibody, or peptide, or fragments and variants thereof) fused to albumin or a fragment (portion) or variant of albumin, that is sufficient to prolong the shelf life of the Therapeutic protein, and/or stabilize the Therapeutic protein and/or its activity in solution (or in a pharmaceutical composition) in vitro and/or in vivo. Nucleic acid molecules encoding the albumin fusion proteins of the invention are also encompassed by the invention, as are vectors containing these nucleic acids, host cells transformed with these nucleic acids vectors, and methods of making the albumin fusion proteins of the invention and using these nucleic acids, vectors, and/or host cells.

[0010] The invention also encompasses pharmaceutical formulations comprising an albumin fusion protein of the invention and a pharmaceutically acceptable diluent or carrier. Such formulations may be in a kit or container. Such kit or container may be packaged with instructions pertaining to the extended shelf life of the Therapeutic protein. Such formulations may be used in methods of treating, preventing, ameliorating or diagnosing a disease or disease symptom in a patient, preferably a mammal, most preferably a human, comprising the step of administering the pharmaceutical formulation to the patient.

[0011] In other embodiments, the present invention encompasses methods of preventing treating, or ameliorating a disease or disorder. In preferred embodiments, the present invention encompasses a method of treating a disease or disorder listed in the “Preferred Indication Y” column of Table 1 comprising administering to a patient in which such treatment, prevention or amelioration is desired an albumin fusion protein of the invention that comprises a Therapeutic protein portion corresponding to a Therapeutic protein (or fragment or variant thereof) disclosed in the “Therapeutic Protein X” column of Table 1 (in the same row as the disease or disorder to be treated is listed in the “Preferred Indication Y” column of Table 1) in an amount effective to treat prevent or ameliorate the disease or disorder.

[0012] In another embodiment, the invention includes a method of extending the shelf life of a Therapeutic protein (e.g., a polypeptide, antibody, or peptide, or fragments and variants thereof) comprising the step of fusing or conjugating the Therapeutic protein to albumin or a fragment (portion) or variant of albumin, that is sufficient to extend the shelf-life of the Therapeutic protein. In a preferred embodiment, the Therapeutic protein used according to this method is fused to the albumin, or the fragment or variant of albumin. In a most preferred embodiment, the Therapeutic protein used according to this method is fused to albumin, or a fragment or variant of albumin, via recombinant DNA technology or genetic engineering.

[0013] In another embodiment, the invention includes a method of stabilizing a Therapeutic protein (e.g., a polypeptide, antibody, or peptide, or fragments and variants thereof) in solution, comprising the step of fusing or conjugating the Therapeutic protein to albumin or a fragment (portion) or variant of albumin, that is sufficient to stabilize the Therapeutic protein. In a preferred embodiment, the Therapeutic protein used according to this method is fused to the albumin, or the fragment or variant of albumin. In a most preferred embodiment, the Therapeutic protein used according to this method is fused to albumin, or a fragment or variant of albumin, via recombinant DNA technology or genetic engineering.

[0014] The present invention further includes transgenic organisms modified to contain the nucleic acid molecules of the invention, preferably modified to express the albumin fusion proteins encoded by the nucleic acid molecules.

### BRIEF DESCRIPTION OF THE FIGURES

[0015] FIG. 1 depicts the extended shelf-life of an HA fusion protein in terms of the biological activity (Nb2 cell proliferation) of HA-hGH remaining after incubation in cell culture media for up to 5 weeks at 37° C. Under these conditions, hGH has no observed activity by week 2.

[0016] FIG. 2 depicts the extended shelf-life of an HA fusion protein in terms of the stable biological activity (Nb2 cell proliferation) of HA-hGH remaining after incubation in cell culture media for up to 3 weeks at 4, 37, or 50° C. Data is normalized to the biological activity of hGH at time zero.

[0017] FIGS. 3A and 3B compare the biological activity of HA-hGH with hGH in the Nb2 cell proliferation assay. FIG. 3A shows proliferation after 24 hours of incubation with various concentrations of hGH or the albumin fusion protein, and FIG. 3B shows proliferation after 48 hours of incubation with various concentrations of hGH or the albumin fusion protein.

[0018] FIG. 4 shows a map of a plasmid (pPPC0005) that can be used as the base vector into which polynucleotides encoding the Therapeutic proteins (including polypeptide and fragments and variants thereof) may be cloned to form HA-fusions. Plasmid Map key: PRB1p: PRB1 S. cerevisiae promoter; FL: Fusion leader sequence; rHA: cDNA encoding HA; ADH1t: ADH1 S. cerevisiae terminator; T3: T3 sequencing primer site; T7: T7 sequencing primer site; Amp R: α-lactamase gene; ori: origin of replication. Please note that in the provisional applications to which this application claims priority, the plasmid in FIG. 4 was labeled pPPC0006, instead of pPPC0005. In addition the drawing of this plasmid did not show certain pertinent restriction sites in this vector. Thus in the present application, the drawing is labeled pPPC0005 and more restriction sites of the same vector are shown.

[0019] FIG. 5 compares the recovery of vial-stored HA-IFN solutions of various concentrations with a stock solution after 48 or 72 hours of storage.

[0020] FIG. 6 compares the activity of an HA-α-IFN fusion protein after administration to monkeys via TV or SC.

[0021] FIG. 7 describes the bioavailability and stability of an HA-α-IFN fusion protein.

[0022] FIG. 8 is a map of an expression vector for the production of HA- -IFN.

[0023] FIG. 9 shows the location of loops in HA.

[0024] FIG. 10 is an example of the modification of an HA loop.

[0025] FIG. 11 is a representation of the HA loops.

[0026] FIG. 12 shows the HA loop IV.

[0027] FIG. 13 shows the tertiary structure of HA.

[0028] FIG. 14 shows an example of a scFv-HA fusion

[0029] FIG. 15 shows the amino acid sequence of the mature form of human albumin (SEQ ID NO:18) and a polynucleotide encoding it (SEQ ID NO:17).

### DETAILED DESCRIPTION

[0030] As described above, the present invention is based, in part, on the discovery that a Therapeutic protein (e.g., a polypeptide, antibody, or peptide, or fragments and variants thereof) may be stabilized to extend the shelf-life and/or retain the Therapeutic protein's activity for extended periods of time in solution (or in a pharmaceutical composition) in vitro and/or in vivo, by genetically fusing or chemically conjugating the Therapeutic protein, polypeptide or peptide to all or a portion of albumin sufficient to stabilize the protein and its activity.

[0031] The present invention relates generally to albumin fusion proteins and methods of treating, preventing, or ameliorating diseases or disorders. As used herein, “albumin fusion protein” refers to a protein formed by the fusion of at least one molecule of albumin (or a fragment or variant thereof) to at least one molecule of a Therapeutic protein (or fragment or variant thereof). An albumin fusion protein of the invention comprises at least a fragment or variant of a Therapeutic protein and at least a fragment or variant of human serum albumin, which are associated with one another, preferably by genetic fusion (i.e., the albumin fusion protein is generated by translation of a nucleic acid in which a polynucleotide encoding all or a portion of a Therapeutic protein is joined in-frame with a polynucleotide encoding all or a portion of albumin) or chemical conjugation to one another. The Therapeutic protein and albumin protein, once part of the albumin fusion protein, may be referred to as a “portion”, “region” or “moiety” of the albumin fusion protein (e.g., a “Therapeutic protein portion” or an “albumin protein portion”).

[0032] In one embodiment, the invention provides an albumin fusion protein comprising, or alternatively consisting of, a Therapeutic protein (e.g., as described in Table 1) and a serum albumin protein. In other embodiments, the invention provides an albumin fusion protein comprising, or alternatively consisting of, a biologically active and/or therapeutically active fragment of a Therapeutic protein and a serum albumin protein. In other embodiments, the invention provides an albumin fusion protein comprising, or alternatively consisting of, a biologically active and/or therapeutically active variant of a Therapeutic protein and a serum albumin protein. In preferred embodiments, the serum albumin protein component of the albumin fusion protein is the mature portion of serum albumin.

[0033] In further embodiments, the invention provides an albumin fusion protein comprising, or alternatively consisting of, a Therapeutic protein, and a biologically active and/or therapeutically active fragment of serum albumin. In further embodiments, the invention provides an albumin fusion protein comprising, or alternatively consisting of, a Therapeutic protein and a biologically active and/or therapeutically active variant of serum albumin. In preferred embodiments, the Therapeutic protein portion of the albumin fusion protein is the mature portion of the Therapeutic protein. In a further preferred embodiment, the Therapeutic protein portion of the albumin fusion protein is the extracellular soluble domain of the Therapeutic protein. In an alternative embodiment, the Therapeutic protein portion of the albumin fusion protein is the active form of the Therapeutic protien.

[0034] In further embodiments, the invention provides an albumin fusion protein comprising, or alternatively consisting of, a biologically active and/or therapeutically active fragment or variant of a Therapeutic protein and a biologically active and/or therapeutically active fragment or variant of serum albumin. In preferred embodiments, the invention provides an albumin fusion protein comprising, or alternatively consisting of, the mature portion of a Therapeutic protein and the mature portion of serum albumin.

[0035] Therapeutic Proteins

[0036] As stated above, an albumin fusion protein of the invention comprises at least a fragment or variant of a Therapeutic protein and at least a fragment or variant of human serum albumin, which are associated with one another, preferably by genetic fusion or chemical conjugation.

[0037] As used herein, “Therapeutic protein” refers to proteins, polypeptides, antibodies, peptides or fragments or variants thereof, having one or more therapeutic and/or biological activities. Therapeutic proteins encompassed by the invention include but are not limited to, proteins, polypeptides, peptides, antibodies, and biologics. (The terms peptides, proteins, and polypeptides are used interchangeably herein.) It is specifically contemplated that the term “Therapeutic protein” encompasses antibodies and fragments and variants thereof. Thus an albumin fusion protein of the invention may contain at least a fragment or variant of a Therapeutic protein, and/or at least a fragment or variant of an antibody. Additionally, the term “Therapeutic protein” may refer to the endogenous or naturally occurring correlate of a Therapeutic protein.

[0038] By a polypeptide displaying a “therapeutic activity” or a protein that is “therapeutically active” is meant a polypeptide that possesses one or more known biological and/or therapeutic activities associated with a therapeutic protein such as one or more of the Therapeutic proteins described herein or otherwise known in the art. As a non-limiting example, a “Therapeutic protein” is a protein that is useful to treat, prevent or ameliorate a disease, condition or disorder. As a non-limiting example, a “Therapeutic protein” may be one that binds specifically to a particular cell type (normal (e.g., lymphocytes) or abnormal e.g., (cancer cells)) and therefore may be used to target a compound (drug, or cytotoxic agent) to that cell type specifically.

[0039] In another non-limiting example, a “Therapeutic protein” is a protein that has a biological activity, and in particular, a biological activity that is useful for treating preventing or ameliorating a disease. A non-inclusive list of biological activities that may be possessed by a Therapeutic protein includes, enhancing the immune response, promoting angiogenesis, inhibiting angiogenesis, regulating hematopoietic functions, stimulating nerve growth, enhancing an immune response, inhibiting an immune response, or any one or more of the biological activities described in the “Biological Activities” section below.

[0040] As used herein, “therapeutic activity” or “activity” may refer to an activity whose effect is consistent with a desirable therapeutic outcome in humans, or to desired effects in non-human mammals or in other species or organisms. Therapeutic activity may be measured in vivo or in vitro. For example, a desirable effect may be assayed in cell culture. As an example, when hGH is the Therapeutic protein, the effects of hGH on cell proliferation as described in Example 1 may be used as the endpoint for which therapeutic activity is measured. Such in vitro or cell culture assays are commonly available for many Therapeutic proteins as described in the art. Examples of assays include, but are not limited to those described herein in the Examples section or in the “Exemplary Activity Assay” column of Table 1.

[0041] Therapeutic proteins corresponding to a Therapeutic protein portion of an albumin fusion protein of the invention, such as cell surface and secretory proteins, are often modified by the attachment of one or more oligosaccharide groups. The modification, referred to as glycosylation, can dramatically affect the physical properties of proteins and can be important in protein stability, secretion, and localization. Glycosylation occurs at specific locations along the polypeptide backbone. There are usually two major types of glycosylation: glycosylation characterized by O-linked oligosaccharides, which are attached to serine or threonine residues; and glycosylation characterized by N-linked oligosaccharides, which are attached to asparagine residues in an Asn-X-Ser/Thr sequence, where X can be any amino acid except proline. N-acetylneuramic acid (also known as sialic acid) is usually the terminal residue of both N-linked and O-linked oligosaccharides. Variables such as protein structure and cell type influence the number and nature of the carbohydrate units within the chains at different glycosylation sites. Glycosylation isomers are also common at the same site within a given cell type.

[0042] For example, several types of human interferon are glycosylated. Natural human interferon-α2 is O-glycosylated at threonine 106, and N-glycosylation occurs at asparagine 72 in interferon-α14 (Adolf et al., J. Biochem 276:511 (1991); Nyman T A et al., J. Biochem 329:295 (1998)). The oligosaccharides at asparagine 80 in natural interferon-β1α may play an important factor in the solubility and stability of the protein, but may not be essential for its biological activity. This permits the production of an unglycosylated analog (interferon-β1b) engineered with sequence modifications to enhance stability (Hosoi et al., J. Interferon Res. 8:375 (1988; Karpusas et al., Cell Mol Life Sci 54:1203 (1998); Knight, J. Interferon Res. 2:421 (1982); Runkel et al., Pharm Res 15:641 (1998); Lin, Dev. Biol. Stand. 96:97 (1998))1. Interferon-γ contains two N-linked oligosaccharide chains at positions 25 and 97, both important for the efficient formation of the bioactive recombinant protein, and having an influence on the pharmacokinetic properties of the protein (Sareneva et al., Eur. J. Biochem 242:191 (1996); Sareneva et al, Biochem J. 303:831 (1994); Sareneva et al., J. Interferon Res. 13:267 (1993)). Mixed O-linked and N-linked glycosylation also occurs, for example in human erythropoietin, N-linked glycosylation occurs at asparagine residues located at positions 24, 38 and 83 while O-linked glycosylation occurs at a serine residue located at position 126 (Lai et al., J. Biol. Chem. 261:3116 (1986); Broudy et al., Arch. Biochem. Biophys. 265:329 (1988)).

[0043] Therapeutic proteins corresponding to a Therapeutic protein portion of an albumin fusion protein of the invention, as well as analogs and variants thereof, may be modified so that glycosylation at one or more sites is altered as a result of manipulation(s) of their nucleic acid sequence, by the host cell in which they are expressed, or due to other conditions of their expression. For example, glycosylation isomers may be produced by abolishing or introducing glycosylation sites, e.g., by substitution or deletion of amino acid residues, such as substitution of glutamine for asparagine, or unglycosylated recombinant proteins may be produced by expressing the proteins in host cells that will not glycosylate them, e.g. in E. coli or glycosylation-deficient yeast. These approaches are described in more detail below and are known in the art.

[0044] Therapeutic proteins (particularly those disclosed in Table 1) and their nucleic acid sequences are well known in the art and available in public databases such as Chemical Abstracts Services Databases (e.g., the CAS Registry), GenBank, and GenSeq as shown in Table 1.

[0045] Additional Therapeutic proteins corresponding to a Therapeutic protein portion of an albumin fusion protein of the invention include, but are not limited to, one or more of the Therapeutic proteins or peptides disclosed in the “Therapeutic Protein X” column of Table 1, or fragment or variable thereof.

[0046] Table 1 provides a non-exhaustive list of Therapeutic proteins that correspond to a Therapeutic protein portion of an albumin fusion protein of the invention. The “Therapeutic Protein X” column discloses Therapeutic protein molecules followed by parentheses containing scientific and brand names that comprise, or alternatively consist of, that Therapeutic protein molecule or a fragment or variant thereof. “Therapeutic protein X” as used herein may refer either to an individual Therapeutic protein molecule (as defined by the amino acid sequence obtainable from the CAS and Genbank accession numbers), or to the entire group of Therapeutic proteins associated with a given Therapeutic protein molecule disclosed in this column. The “Exemplary Identifier” column provides Chemical Abstracts Services (CAS) Registry Numbers (published by the American Chemical Society) and/or Genbank Accession Numbers ((e.g., Locus ID, NP_XXXXX (Reference Sequence Protein), and XP_XXXXX (Model Protein) identifiers available through the national Center for Biotechnology Information (NCBI) webpage at www.ncbi.nlm.nih.gov) that correspond to entries in the CAS Registry or Genbank database which contain an amino acid sequence of the Therapeutic Protein Molecule or of a fragment or variant of the Therapeutic Protein Molecule. In addition GenSeq Accession numbers and/or journal publication citations are given to identify the exemplary amino acid sequence for some polypeptides. The summary pages associated with each of these CAS and Genbank and GenSeq Accession Numbers as well as the cited journal publications (e.g., PubMed ID number (PMID)) are each incorporated by reference in their entireties, particularly with respect to the amino acid sequences described therein. The “PCT/Patent Reference” column provides U.S. Patent numbers, or PCT International Publication Numbers corresponding to patents and/or published patent applications that describe the Therapeutic protein molecule. Each of the patents and/or published patent applications cited in the “PCT/Patent Reference” column are herein incorporated by reference in their entireties. In particular, the amino acid sequences of the specified polypeptide set forth in the sequence listing of each cited “PCT/Patent Reference”, the variants of these amino acid sequences (mutations, fragments, etc.) set forth, for example, in the detailed description of each cited “PCT/Patent Reference”, the therapeutic indications set forth, for example, in the detailed description of each cited “PCT/Patent Reference”, and the activity asssaysfor the specified polypeptide set forth in the detailed description, and more particularly, the examples of each cited “PCT/Patent Reference” are incorporated herein by reference. The “Biological activity” column describes Biological activities associated with the Therapeutic protein molecule. The “Exemplary Activity Assay” column provides references that describe assays which may be used to test the therapeutic and/or biological activity of a Therapeutic protein or an albumin fusion protein of the invention comprising a Therapeutic protein X portion. Each of the references cited in the “Exemplary Activity Assay” column are herein incorporated by reference in their entireties, particularly with respect to the description of the respective activity assay described in the reference (see Methods section, for example) for assaying the corresponding biological activity set forth in the “Biological Activity” column of Table 1. The “Preferred Indication Y” column describes disease, disorders, and/or conditions that may be treated, prevented, diagnosed, or ameliorated by Therapeutic protein X or an albumin fusion protein of the invention comprising a Therapeutic protein X portion.

[0047] The recitation of “Cancer” in the “Preferred Indication Y” column indicates that corresponding Therapeutic protein, fusion protein containing the Therapeutic protein, and fragments and variants thereof, may be used for example, to diagnose, treat, prevent, and/or ameliorate diseases and/or disorders relating to neoplastic diseases (e.g., leukemias, cancers, and/or as described below under “Hyperproliferative Disorders”).

[0048] In specific embodiments, a Therapeutic protein having a “Cancer” recitation in the “Preferred Indication” column of Table 1, an albumin fusion protein that comprises a Therapeutic protein portion corresponding to this Therapeutic protein, and fragments and variants thereof, may be used for example, to diagnose, treat, prevent, and/or ameliorate a neoplasm located in a tissue selected from the group consisting of: colon, abdomen, bone, breast, digestive system, liver, pancreas, prostate, peritoneum, lung, blood (e.g., leukemia), endocrine glands (adrenal, parathyroid, pituitary, testicles, ovary, thymus, thyroid), uterus, eye, head and neck, nervous (central and peripheral), lymphatic system, pelvic, skin, soft tissue, spleen, thoracic, and urogenital.

[0049] In specific embodiments, a Therapeutic protein having a “Cancer” recitation in the “Preferred Indication” column of Table 1, an albumin fusion protein that comprises a Therapeutic protein portion corresponding to this Therapeutic protein, and fragments and variants thereof, may be used for example, to diagnose, treat, prevent, and/or ameliorate a pre-neoplastic condition, selected from the group consisting of: hyperplasia (e.g., endometrial hyperplasia and/or as described in the section entitled “Hyperproliferative Disorders”), metaplasia (e.g., connective tissue metaplasia, a typical metaplasia, and/or as described in the section entitled “Hyperproliferative Disorders”), and/or dysplasia (e.g., cervical dysplasia, and bronchopulmonary dysplasia).

[0050] In another specific embodiment, a Therapeutic protein having a “Cancer” recitation in the “Preferred Indication” column of Table 1, an albumin fusion protein that comprises a Therapeutic protein portion corresponding to this Therapeutic protein, and fragments and variants thereof, may be used for example, to diagnose, treat, prevent, and/or ameliorate a benign dysproliferative disorder selected from the group consisting of: benign tumors, fibrocystic conditions, tissue hypertrophy, and/or as described in the section entitled “Hyperproliferative Disorders”.

[0051] The recitation of “Immune/Hematopoietic” in the “Preferred Indication Y” column indicates that corresponding Therapeutic protein, fusion protein containing the Therapeutic protein, and fragments and variants thereof, may be used for example, to diagnose, treat, prevent, and/or ameliorate diseases and/or disorders relating to neoplastic diseases (e.g., as described below under “Hyperproliferative Disorders”), blood disorders (e.g., as described below under “Immune Activity” “Cardiovascular Disorders” and/or “Blood-Related Disorders”), and infections (e.g., as described below under “Infectious Disease”).

[0052] In specific embodiments, a Therapeutic protein having a “Immune/Hematopoietic” recitation in the “Preferred Indication” column of Table 1, a fusion protein containing this Therapeutic protein, and fragments and variants thereof, may be used for example, to diagnose, treat, prevent, and/or ameliorate a disease or disorder selected from the group consisting of: anemia, pancytopenia, leukopenia, thrombocytopenia, leukemias, Hodgkin's disease, non-Hodgkin's lymphoma, acute lymphocytic anemia (ALL), plasmacytomas, multiple myeloma, Burkitt's lymphoma, arthritis, asthma, A/DS, autoimmune disease, rheumatoid arthritis, granulomatous disease, immune deficiency, inflammatory bowel disease, sepsis, neutropenia, neutrophilia, psoriasis, immune reactions to transplanted organs and tissues, systemic lupus erythematosis, hemophilia, hypercoagulation, diabetes mellitus, endocarditis, meningitis, Lyme Disease, and allergies.

[0053] The recitation of “Reproductive” in the “Preferred Indication Y” column indicates that corresponding Therapeutic protein, fusion protein containing the Therapeutic protein, and fragments and variants thereof, may be used for example, to diagnose, treat, prevent, and/or ameliorate diseases and/or disorders relating to neoplastic diseases (e.g., as described below under “Hyperproliferative Disorders”), and disorders of the reproductive system (e.g., as described below under “Reproductive System Disorders”).

[0054] In specific embodiments, a Therapeutic protein having a “Reproductive” recitation in the “Preferred Indication” column of Table 1, a fusion protein containing this Therapeutic protein, and fragments and variants thereof, may be used for example, to diagnose, treat, prevent, and/or ameliorate a disease or disorder selected from the group consisting of: cryptorchism, prostatitis, inguinal hernia, varicocele, leydig cell tumors, verrucous carcinoma, prostatitis, malacoplakia, Peyronie's disease, penile carcinoma, squamous cell hyperplasia, dysmenorrhea, ovarian adenocarcinoma, Turner's syndrome, mucopurulent cervicitis, Sertoli-leydig tumors, ovarian cancer, uterine cancer, pelvic inflammatory disease, testicular cancer, prostate cancer, Klinefelter's syndrome, Young's syndrome, premature ejaculation, diabetes mellitus, cystic fibrosis, Kartagener's syndrome, testicular atrophy, testicular feminization, anorchia, ectopic testis, epididymitis, orchitis, gonorrhea, syphilis, testicular torsion, vasitis nodosa, germ cell tumors, stromal tumors, dysmenorrhea, retroverted uterus, endometriosis, fibroids, adenomyosis, anovulatory bleeding, amenorrhea, Cushing's syndrome, hydatidiform moles, Asherman's syndrome, premature menopause, precocious puberty, uterine polyps, dysfunctional uterine bleeding, cervicitis, chronic cervicitis, mucopurulent cervicitis, cervical dysplasia, cervical polyps, Nabothian cysts, cervical erosion, cervical incompetence, cervical neoplasms, pseudohermaphroditism, and premenstrual syndrome.

[0055] The recitation of “Musculoskeletal” in the “Preferred Indication Y” column indicates that corresponding Therapeutic protein, fusion protein containing the Therapeutic protein, and fragments and variants thereof, may be used for example, to diagnose, treat, prevent, and/or ameliorate diseases and/or disorders relating to neoplastic diseases (e.g., as described below under “Hyperproliferative Disorders”), and disorders of the immune system (e.g., as described below under “Immune Activity”).

[0056] In specific embodiments, a Therapeutic protein having a “Musculoskeletal” recitation in the “Preferred Indication” column of Table 1, a fusion protein containing this Therapeutic protein, and fragments and variants thereof, may be used for example, to diagnose, treat, prevent, and/or ameliorate a disease or disorder selected from the group consisting of: bone cancers (e.g., osteochondromas, benign chondromas, chondroblastoma, chondromyxoid fibromas, osteoid osteomas, giant cell tumors, multiple myeloma, osteosarcomas), Paget's Disease, rheumatoid arthritis, systemic lupus erythematosus, osteomyelitis, Lyme Disease, gout, bursitis, tendonitis, osteoporosis, osteoarthritis, muscular dystrophy, mitochondrial myopathy, cachexia, and multiple sclerosis.

[0057] The recitation of “Cardiovascular” in the “Preferred Indication Y” column indicates that corresponding Therapeutic protein, fusion protein containing the Therapeutic protein, and fragments and variants thereof, may be used for example, to diagnose, treat, prevent, and/or ameliorate diseases and/or disorders relating to neoplastic diseases (e.g., as described below under “Hyperproliferative Disorders”), and disorders of the cardiovascular system (e.g., as described below under “Cardiovascular Disorders”).

[0058] In specific embodiments, a Therapeutic protein having a “Cardiovascular” recitation in the “Preferred Indication” column of Table 1, a fusion protein containing this Therapeutic protein, and fragments and variants thereof, may be used for example, to diagnose, treat, prevent, and/or ameliorate a disease or disorder selected from the group consisting of: myxomas, fibromas, rhabdomyomas, cardiovascular abnormalities (e.g., congenital heart defects, cerebral arterioyenous malformations, septal defects), heart disease (e.g., heart failure, congestive heart disease, arrhythmia, tachycardia, fibrillation, pericardial Disease, endocarditis), cardiac arrest, heart valve disease (e.g., stenosis, regurgitation, prolapse), vascular disease (e.g., hypertension, coronary artery disease, angina, aneurysm, arteriosclerosis, peripheral vascular disease), hyponatremia, hypernatremia, hypokalemia, and hyperkalemia.

[0059] The recitation of “Mixed Fetal” in the “Preferred Indication Y” column indicates that corresponding Therapeutic protein, fusion protein containing the Therapeutic protein, and fragments and variants thereof, may be used for example, to diagnose, treat, prevent, and/or ameliorate diseases and/or disorders relating to neoplastic diseases (e.g., as described below under “Hyperproliferative Disorders”).

[0060] In specific embodiments, a Therapeutic protein having a “Mixed Fetal” recitation in the “Preferred Indication” column of Table 1, an albumin fusion protein that comprises a Therapeutic protein portion corresponding to this Therapeutic protein, and fragments and variants thereof, may be used for example, to diagnose, treat, prevent, and/or ameliorate a disease or disorder selected from the group consisting of: spina bifida, hydranencephaly, neurofibromatosis, fetal alcohol syndrome, diabetes mellitus, PKU, Down's syndrome, Patau syndrome, Edwards syndrome, Turner syndrome, Apert syndrome, Carpenter syndrome, Conradi syndrome, Crouzon syndrome, cutis laxa, Cornelia de Lange syndrome, Ellis-van Creveld syndrome, Holt-Oram syndrome, Kartagener syndrome, Meckel-Gruber syndrome, Noonan syndrome, Pallister-Hall syndrome, Rubinstein-Taybi syndrome, Scimitar syndrome, Smith-Lemli-Opitz syndrome, thromocytopenia-absent radius (TAR) syndrome, Treacher Collins syndrome, Williams syndrome, Hirschsprung's disease, Meckel's diverticulum, polycystic kidney disease, Turner's syndrome, and gonadal dysgenesis, Klippel-Feil syndrome, Ostogenesis imperfecta, muscular dystrophy, Tay-Sachs disease, Wilm's tumor, neuroblastoma, and retinoblastoma.

[0061] The recitation of “Excretory” in the “Preferred Indication Y” column indicates that corresponding Therapeutic protein, fusion protein containing the Therapeutic protein, and fragments and variants thereof, may be used for example, to diagnose, treat, prevent, and/or ameliorate diseases and/or disorders relating to neoplastic diseases (e.g., as described below under “Hyperproliferative Disorders”) and renal disorders (e.g., as described below under “Renal Disorders”).

[0062] In specific embodiments, a Therapeutic protein having a “Excretory” recitation in the “Preferred Indication” column of Table 1, an albumin fusion protein that comprises a Therapeutic protein portion corresponding to this Therapeutic protein, and fragments and variants thereof, may be used for example, to diagnose, treat, prevent, and/or ameliorate a disease or disorder selected from the group consisting of: bladder cancer, prostate cancer, benign prostatic hyperplasia, bladder disorders (e.g., urinary incontinence, urinary retention, urinary obstruction, urinary tract Infections, interstitial cystitis, prostatitis, neurogenic bladder, hematuria), renal disorders (e.g., hydronephrosis, proteinuria, renal failure, pyelonephritis, urolithiasis, reflux nephropathy, and unilateral obstructive uropathy).

[0063] The recitation of “Neural/Sensory” in the “Preferred Indication Y” column indicates that corresponding Therapeutic protein, fusion protein containing the Therapeutic protein, and fragments and variants thereof, may be used for example, to diagnose, treat, prevent, and/or ameliorate diseases and/or disorders relating to neoplastic diseases (e.g., as described below under “Hyperproliferative Disorders”) and diseases or disorders of the nervous system (e.g., as described below under “Neural Activity and Neurological Diseases”).

[0064] In specific embodiments, a Therapeutic protein having a “Neural/Sensory” recitation in the “Preferred Indication” column of Table 1, an albumin fusion protein that comprises a Therapeutic protein portion corresponding to this Therapeutic protein, and fragments and variants thereof, may be used for example, to diagnose, treat, prevent, and/or ameliorate a disease or disorder selected from the group consisting of: brain cancer (e.g., brain stem glioma, brain tumors, central nervous system (Primary) lymphoma, central nervous system lymphoma, cerebellar astrocytoma, and cerebral astrocytoma, neurodegenerative disorders (e.g., Alzheimer's Disease, Creutzfeldt-Jakob Disease, Parkinson's Disease, and Idiopathic Presenile Dementia), encephalomyelitis, cerebral malaria, meningitis, metabolic brain diseases (e.g., phenylketonuria and pyruvate carboxylase deficiency), cerebellar ataxia, ataxia telangiectasia, and AIDS Dementia Complex, schizophrenia, attention deficit disorder, hyperactive attention deficit disorder, autism, and obsessive compulsive disorders.

[0065] The recitation of “Respiratory” in the “Preferred Indication Y” column indicates that corresponding Therapeutic protein, fusion protein containing the Therapeutic protein, and fragments and variants thereof, may be used for example, to diagnose, treat, prevent, and/or ameliorate diseases and/or disorders relating to neoplastic diseases (e.g., as described below under “Hyperproliferative Disorders”) and diseases or disorders of the respiratory system (e.g., as described below under “Respiratory Disorders”).

[0066] In specific embodiments, a Therapeutic protein having a “Respiratory” recitation in the “Preferred Indication” column of Table 1, an albumin fusion protein that comprises a Therapeutic protein portion corresponding to this Therapeutic protein, and fragments and variants thereof, may be used for example, to diagnose, treat, prevent, and/or ameliorate a disease or disorder selected from the group consisting of: cancers of the respiratory system such as larynx cancer, pharynx cancer, trachea cancer, epiglottis cancer, lung cancer, squamous cell carcinomas, small cell (oat cell) carcinomas, large cell carcinomas, and adenocarcinomas. Allergic reactions, cystic fibrosis, sarcoidosis, histiocytosis X, infiltrative lung diseases (e.g., pulmonary fibrosis and lymphoid interstitial pneumonia), obstructive airway diseases (e.g., asthma, emphysema, chronic or acute bronchitis), occupational lung diseases (e.g., silicosis and asbestosis), pneumonia, and pleurisy.

[0067] The recitation of “Endocrine” in the “Preferred Indication Y” column indicates that corresponding Therapeutic protein, fusion protein containing the Therapeutic protein, and fragments and variants thereof, may be used for example, to diagnose, treat, prevent, and/or ameliorate diseases and/or disorders relating to neoplastic diseases (e.g., as described below under “Hyperproliferative Disorders”) and diseases or disorders of the respiratory system (e.g., as described below under “Respiratory Disorders”), renal disorders (e.g., as described below under “Renal Disorders”), and disorders of the endocrine system (e.g., as described below under “Endocrine Disorders”.

[0068] In specific embodiments, a Therapeutic protein having a “Endocrine” recitation in the “Preferred Indication” column of Table 1, an albumin fusion protein that comprises a Therapeutic protein portion corresponding to this Therapeutic protein, and fragments and variants thereof, may be used for example, to diagnose, treat, prevent, and/or ameliorate a disease or disorder selected from the group consisting of: cancers of endocrine tissues and organs (e.g., cancers of the hypothalamus, pituitary gland, thyroid gland, parathyroid glands, pancreas, adrenal glands, ovaries, and testes), diabetes (e.g., diabetes insipidus, type I and type II diabetes mellitus), obesity, disorders related to pituitary glands (e.g., hyperpituitarism, hypopituitarism, and pituitary dwarfism), hypothyroidism, hyperthyroidism, goiter, reproductive disorders (e.g. male and female infertility), disorders related to adrenal glands (e.g., Addison's Disease, corticosteroid deficiency, and Cushing's Syndrome), kidney cancer (e.g., hypemephroma, transitional cell cancer, and Wilm's tumor), diabetic nephropathy, interstitial nephritis, polycystic kidney disease, glomenilonephritis (e.g., IgM mesangial proliferative glomerulonephritis and glomerulonephritis caused by autoimmune disorders; such as Goodpasture's syndrome), and nephrocalcinosis.

[0069] The recitation of “Digestive” in the “Preferred Indication Y” column indicates that corresponding Therapeutic protein, fusion protein containing the Therapeutic protein, and fragments and variants thereof, may be used for example, to diagnose, treat, prevent, and/or ameliorate diseases and/or disorders relating to neoplastic diseases (e.g., as described below under “Hyperproliferative Disorders”) and diseases or disorders of the gastrointestinal system (e.g., as described below under “Gastrointestinal Disorders”.

[0070] In specific embodiments, a Therapeutic protein having a “Digestive” recitation in the “Preferred Indication” column of Table 1, an albumin fusion protein that comprises a Therapeutic protein portion corresponding to this Therapeutic protein, and fragments and variants thereof, may be used for example, to diagnose, treat, prevent, and/or ameliorate a disease or disorder selected from the group consisting of: ulcerative colitis, appendicitis, Crohn's disease, hepatitis, hepatic encephalopathy, portal hypertension, cholelithiasis, cancer of the digestive system (e.g., biliary tract cancer, stomach cancer, colon cancer, gastric cancer, pancreatic cancer, cancer of the bile duct, tumors of the colon (e.g., polyps or cancers), and cirrhosis), pancreatitis, ulcerative disease, pyloric stenosis, gastroenteritis, gastritis, gastric atropy, benign tumors of the duodenum, distension, irritable bowel syndrome, malabsorption, congenital disorders of the small intestine, bacterial and parasitic infection, megacolon, Hirschsprung's disease, aganglionic megacolon, acquired megacolon, colitis, anorectal disorders (e.g., anal fistulas, hemorrhoids), congenital disorders of the liver (e.g., Wilson's disease, hemochromatosis, cystic fibrosis, biliary atresia, and alpha1-antitrypsin deficiency), portal hypertension, cholelithiasis, and jaundice.

[0071] The recitation of “Connective/Epithelial” in the “Preferred Indication Y” column indicates that corresponding Therapeutic protein, fusion protein containing the Therapeutic protein, and fragments and variants thereof, may be used for example, to diagnose, treat, prevent, and/or ameliorate diseases and/or disorders relating to neoplastic diseases (e.g., as described below under “Hyperproliferative Disorders”), cellular and genetic abnormalities (e.g., as described below under “Diseases at the Cellular Level”), angiogenesis (e.g., as described below under “Anti-Angiogenesis Activity”), and or to promote or inhibit regeneration (e.g., as described below under “Regeneration”), and wound healing (e.g., as described below under “Wound Healing and Epithelial Cell Proliferation”).

[0072] In specific embodiments, a Therapeutic protein having a “Connective/Epithelial” recitation in the “Preferred Indication” column of Table 1, an albumin fusion protein that comprises a Therapeutic protein portion corresponding to this Therapeutic protein, and fragments and variants thereof, may be used for example, to diagnose, treat, prevent, and/or ameliorate a disease or disorder selected from the group consisting of: connective tissue metaplasia, mixed connective tissue disease, focal epithelial hyperplasia, epithelial metaplasia, mucoepithelial dysplasia, graft v. host disease, polymyositis, cystic hyperplasia, cerebral dysplasia, tissue hypertrophy, Alzheimer's disease, lymphoproliferative disorder, Waldenstron's macroglobulinemia, Crohn's disease, pernicious anemia, idiopathic Addison's disease, glomerulonephritis, bullous pemphigoid, Sjogren's syndrome, diabetes mellitus, cystic fibrosis, osteoblastoma, osteoclastoma, osteosarcoma, chondrosarcoma, osteoporosis, osteocarthritis, periodontal disease, wound healing, relapsing polychondritis, vasculitis, polyarteritis nodosa, Wegener's granulomatosis, cellulitis, rheumatoid arthritis, psoriatic arthritis, discoid lupus erythematosus, systemic lupus erythematosus, scleroderma, CREST syndrome, Sjogren's syndrome, polymyositis, dermatomyositis, mixed connective tissue disease, relapsing polychondritis, vasculitis, Henoch-Schonlein syndrome, erythema nodosum, polyarteritis nodosa, temporal (giant cell) arteritis, Takayasu's arteritis, Wegener's granulomatosis, Reiter's syndrome, Behcet's syndrome, ankylosing spondylitis, cellulitis, keloids, Ehler Danlos syndrome, Marfan syndrome, pseudoxantoma elasticum, osteogenese imperfecta, chondrodysplasias, epidermolysis bullosa, Alport syndrome, and cutis laxa.

| Therapeutic | Exemplary | | |
|---|---|---|---|
| Protein X | Identifier | PCT/Patent Reference | Preferred Indication Y |
| HETFO52 | B03768 | US6066724-A | Neural/Sensory, |
| | | | Reproductive |
| HETEZ10 | B03769 | US6066724-A | Cancer |
| HLICR58 | B08775 | WO200052160-A1 | Cancer |
| HMCIS41 | B08776 | WO200052160-A1 | Cancer |
| HCESA34 | B08891 | WO200017222-A1 | Cancer |
| HCRMZ90 | B08892 | WO200017222-A1 | Cancer |
| HDPXQ54 | B08893 | WO200017222-A1 | Immune/Hematopoietic |
| HETCL11 | B08894 | WO200017222-A1 | Cancer |
| HFXDN34 | B08895 | WO200017222-A1 | Neural/Sensory |
| HKAAV24 | B08896 | WO200017222-A1 | Cancer |
| HMTBE31 | B08897 | WO200017222-A1 | Cancer |
| HRADL70 | B08898 | WO200017222-A1 | Excretory, |
| | | | Immune/Hematopoietic |
| HTXGG31 | B08899 | WO200017222-A1 | Cancer |
| HWHHL34 | B08900 | WO200017222-A1 | Cancer |
| HYAAY40 | B08901 | WO200017222-A1 | Immune/Hematopoietic |
| HPASA81 | B08902 | WO200017222-A1 | Digestive, |
| | | | Endocrine, Reproductive |
| HCNDA61 | B08903 | WO200017222-A1 | Digestive, Reproductive |
| HTHCZ41 | B08904 | WO200017222-A1 | Cancer |
| HKADJ17 | B08905 | WO200017222-A1 | Connective/Epithelial, |
| | | | Immune/Hematopoietic, |
| | | | Reproductive |
| HMSII78 | B08906 | WO200017222-A1 | Cancer |
| HCFBL76 | B08907 | WO200017222-A1 | Cancer |
| HFVHR84 | B08908 | WO200017222-A1 | Connective/Epithelial, |
| | | | Digestive |
| HIBCB67 | B08909 | WO200017222-A1 | Cancer |
| HCELI29 | B08910 | WO200017222-A1 | Cancer |
| HAHDZ77 | B08911 | WO200017222-A1 | Cardiovascular, |
| | | | Mixed Fetal |
| HDHMA45 | B08912 | WO200017222-A1 | Cardiovascular, |
| | | | Neural/Sensory |
| HELAW45 | B08913 | WO200017222-A1 | Cardiovascular |
| HFIAB31 | B08914 | WO200017222-A1 | Cancer |
| HLWBK05 | B08915 | WO200017222-A1 | Cancer |
| HLDBX13 | B08916 | WO200017222-A1 | Digestive |
| HMAGA15 | B08917 | WO200017222-A1 | Cancer |
| HMWFT53 | B08918 | WO200017222-A1 | Immune/Hematopoietic |
| HNFJD91 | B08919 | WO200017222-A1 | Cardiovascular, |
| | | | Connective/Epithelial, |
| | | | Immune/Hematopoietic |
| HTGCM55 | B08920 | WO200017222-A1 | Cardiovascular, |
| | | | Digestive, |
| | | | Immune/Hematopoietic |
| HTTEX77 | B08921 | WO200017222-A1 | Cancer |
| HFXDN34 | B08922 | WO200017222-A1 | Neural/Sensory |
| HDPMI18 | B08923 | WO200017222-A1 | Cancer |
| HETGL41 | B08924 | WO200017222-A1 | Cancer |
| HPASA81 | B08925 | WO200017222-A1 | Digestive, |
| | | | Endocrine, |
| | | | Reproductive |
| HCNDA61 | B08926 | WO200017222-A1 | Digestive, |
| | | | Reproductive |
| HTTEX77 | B08927 | WO200017222-A1 | Cancer |
| HFXDN34 | B08934 | WO200017222-A1 | Neural/Sensory |
| HETGL41 | B08935 | WO200017222-A1 | Cancer |
| HPASA81 | B08936 | WO200017222-A1 | Digestive, |
| | | | Endocrine, |
| | | | Reproductive |
| HCNDA61 | B08940 | WO200017222-A1 | Digestive, |
| | | | Reproductive |
| HTTEX77 | B08982 | WO200017222-A1 | Cancer |
| HAOAB14 | B12301 | WO200029422-A1 | Digestive, Musculoskeletal |
| HHFBY53 | B12302 | WO200029422-A1 | Cancer |
| HE2FE69 | B12303 | WO200029422-A1 | Cancer |
| HNHFI33 | B12305 | WO200029422-A1 | Immune/Hematopoietic |
| HAMFE15 | B12306 | WO200029422-A1 | Cancer |
| HAMFE82 | B12307 | WO200029422-A1 | Cancer |
| HCWEM59 | B12308 | WO200029422-A1 | Immune/Hematopoietic |
| HDPGE10 | B12309 | WO200029422-A1 | Immune/Hematopoietic |
| HDPGP94 | B12310 | WO200029422-A1 | Digestive, |
| | | | Immune/Hematopoietic |
| HFPBY77 | B12311 | WO200029422-A1 | Cancer |
| HFXHK32 | B12312 | WO200029422-A1 | Neural/Sensory |
| HMTAK05 | B12313 | WO200029422-A1 | Cancer |
| HMWDC93 | B12314 | WO200029422-A1 | Immune/Hematopoietic |
| HSPBY40 | B12315 | WO200029422-A1 | Cancer |
| HODDO08 | B12316 | WO200029422-A1 | Cancer |
| HCFNK47 | B12317 | WO200029422-A1 | Cancer |
| HE2FL70 | B12318 | WO200029422-A1 | Immune/Hematopoietic, |
| | | | Mixed Fetal, |
| | | | Neural/Sensory |
| H2MBY03 | B12319 | WO200029422-A1 | Cancer |
| HACBS38 | B12320 | WO200029422-A1 | Cancer |
| HAGFG51 | B12321 | WO200029422-A1 | Neural/Sensory |
| HBQAB44 | B12322 | WO200029422-A1 | Neural/Sensory, |
| | | | Reproductive, |
| | | | Respiratory |
| HHEMA59 | B12323 | WO200029422-A1 | Cancer |
| HJBAV55 | B12324 | WO200029422-A1 | Cancer |
| HLHEY02 | B12325 | WO200029422-A1 | Endocrine, |
| | | | Respiratory |
| HSAAO94 | B12326 | WO200029422-A1 | Cancer |
| HTXKP61 | B12327 | WO200029422-A1 | Cancer |
| HWABC21 | B12328 | WO200029422-A1 | Cancer |
| HWBDI30 | B12329 | WO200029422-A1 | Cancer |
| HYBAR26 | B12330 | WO200029422-A1 | Musculoskeletal |
| HAJAF57 | B12331 | WO200029422-A1 | Cancer |
| HAMFE15 | B12332 | WO200029422-A1 | Cancer |
| HAMFE82 | B12333 | WO200029422-A1 | Cancer |
| HAMFE15 | B12338 | WO200029422-A1 | Cancer |
| HAMFE82 | B12339 | WO200029422-A1 | Cancer |
| HLDOK36 | B15551 | WO200056752-A2 | Cancer |
| HDPBW68 | B15552 | WO200056752-A2 | Cancer |
| HHEFO24 | B15553 | WO200056752-A2 | Cardiovascular, |
| | | | Immune/Hematopoietic, |
| | | | Neural/Sensory |
| HEGAL46 | B15554 | WO200056752-A2 | Cancer |
| HFOYC02 | B15555 | WO200056752-A2 | Cancer |
| HDABV82 | B15556 | WO200056752-A2 | Cancer |
| HCEMU42 | B15557 | WO200056752-A2 | Cancer |
| HSIFO61 | B15558 | WO200056752-A2 | Cancer |
| HDPBW68 | B15559 | WO200056752-A2 | Cancer |
| HDPBW68 | B15562 | WO200056752-A2 | Cancer |
| HSIFO61 | B15566 | WO200056752-A2 | Cancer |
| HOEAL47 | B18715 | WO200054651-A2 | Cancer |
| HE9SF68 | B18755 | WO200055204-A1 | Cancer |
| HLICQ90 | B24437 | WO200035937-A1 | Cancer |
| HNTSM04 | B24438 | WO200035937-A1 | Cancer |
| HMCAL59 | B24439 | WO200035937-A1 | Cancer |
| HMACO04 | B24440 | WO200035937-A1 | Cancer |
| HMAHY59 | B24441 | WO200035937-A1 | Cancer |
| HFXLL52 | B24442 | WO200035937-A1 | Neural/Sensory |
| HKABY55 | B24443 | WO200035937-A1 | Cancer |
| HCQCF36 | B24444 | WO200035937-A1 | Digestive, |
| | | | Immune/Hematopoietic |
| HTADO22 | B24445 | WO200035937-A1 | Immune/Hematopoietic |
| HHFHD92 | B24446 | WO200035937-A1 | Cancer |
| HNGFW58 | B24447 | WO200035937-A1 | Cancer |
| HOEFV61 | B24448 | WO200035937-A1 | Cancer |
| HPIAQ68 | B24449 | WO200035937-A1 | Immune/Hematopoietic, |
| | | | Reproductive |
| HNFFY60 | B24450 | WO200035937-A1 | Cancer |
| HCE3H20 | B24451 | WO200035937-A1 | Cancer |
| HE8EW79 | B24452 | WO200035937-A1 | Cancer |
| HTTDF41 | B24453 | WO200035937-A1 | Cancer |
| HSSGJ45 | B24454 | WO200035937-A1 | Cancer |
| HLWBY76 | B24455 | WO200035937-A1 | Cancer |
| HDPBN34 | B24456 | WO200035937-A1 | Immune/Hematopoietic |
| HMSHY73 | B24457 | WO200035937-A1 | Cancer |
| HPRBF19 | B24458 | WO200035937-A1 | Cancer |
| HNFJE06 | B24459 | WO200035937-A1 | Immune/Hematopoietic, |
| | | | Musculoskeletal |
| HCHCF61 | B24460 | WO200035937-A1 | Reproductive |
| HBJLH40 | B24461 | WO200035937-A1 | Cancer |
| HDPMV72 | B24462 | WO200035937-A1 | Cancer |
| HEMFA84 | B24463 | WO200035937-A1 | Cancer |
| HTOHW95 | B24464 | WO200035937-A1 | Cancer |
| HUNAH63 | B24465 | WO200035937-A1 | Reproductive |
| HISBT59 | B24466 | WO200035937-A1 | Cancer |
| HNTAS52 | B24467 | WO200035937-A1 | Cancer |
| HRACM44 | B24468 | WO200035937-A1 | Excretory, |
| | | | Immune/Hematopoietic |
| HFPES77 | B24469 | WO200035937-A1 | Cancer |
| HUSXU29 | B24470 | WO200035937-A1 | Cancer |
| HOHBB49 | B24471 | WO200035937-A1 | Musculoskeletal |
| HRABX31 | B24472 | WO200035937-A1 | Excretory, |
| | | | Immune/Hematopoietic, |
| | | | Musculoskeletal |
| HROBD68 | B24473 | WO200035937-A1 | Cancer |
| HMHBE18 | B24474 | WO200035937-A1 | Cancer |
| HNHDY21 | B24475 | WO200035937-A1 | Immune/Hematopoietic |
| HOEBZ89 | B24476 | WO200035937-A1 | Cancer |
| HYAAJ71 | B24477 | WO200035937-A1 | Immune/Hematopoietic |
| HTEKS16 | B24478 | WO200035937-A1 | Connective/Epithelial, |
| | | | Mixed Fetal, |
| | | | Reproductive |
| HCUFX40 | B24479 | WO200035937-A1 | Immune/Hematopoietic |
| HCWDL75 | B24480 | WO200035937-A1 | Cardiovascular, |
| | | | Immune/Hematopoietic |
| HNHKJ57 | B24481 | WO200035937-A1 | Immune/Hematopoietic |
| HCMSS06 | B24482 | WO200035937-A1 | Cancer |
| HIBCE35 | B24483 | WO200035937-A1 | Cancer |
| HE8EW79 | B24484 | WO200035937-A1 | Cancer |
| HTTDF41 | B24485 | WO200035937-A1 | Cancer |
| HSSGJ45 | B24486 | WO200035937-A1 | Cancer |
| HCMSS06 | B24487 | WO200035937-A1 | Cancer |
| HCMSS06 | B24597 | WO200035937-A1 | Cancer |
| HAOAB64 | B25576 | WO200029435-A1 | Musculoskeletal, |
| | | | Reproductive |
| HOHCH55 | B25577 | WO200029435-A1 | Cancer |
| HTLEW81 | B25578 | WO200029435-A1 | Cancer |
| HARAO44 | B25579 | WO200029435-A1 | Neural/Sensory |
| HDPCL05 | B25580 | WO200029435-A1 | Immune/Hematopoietic |
| HDPUW68 | B25581 | WO200029435-A1 | Cancer |
| HOHBY69 | B25582 | WO200029435-A1 | Cancer |
| HCDDP40 | B25583 | WO200029435-A1 | Immune/Hematopoietic, |
| | | | Musculoskeletal |
| HUSAQ05 | B25585 | WO200029435-A1 | Cancer |
| HOUDJ81 | B25586 | WO200029435-A1 | Cancer |
| HPWCM76 | B25587 | WO200029435-A1 | Reproductive |
| HOHCH55 | B25588 | WO200029435-A1 | Cancer |
| HDPCL05 | B25589 | WO200029435-A1 | Immune/Hematopoietic |
| HOHBY69 | B25590 | WO200029435-A1 | Cancer |
| HUSAQ05 | B25592 | WO200029435-A1 | Cancer |
| HOUDJ81 | B25593 | WO200029435-A1 | Cancer |
| HUSAQ05 | B25618 | WO200029435-A1 | Cancer |
| HE8NG02 | B25665 | WO200043495-A2 | Mixed Fetal, |
| | | | Reproductive |
| HWBDM37 | B25666 | WO200043495-A2 | Digestive, |
| | | | Immune/Hematopoietic, |
| | | | Reproductive |
| HODFN71 | B25668 | WO200043495-A2 | Mixed Fetal, |
| | | | Reproductive |
| HODGE68 | B25669 | WO200043495-A2 | Reproductive |
| HCECN54 | B25670 | WO200043495-A2 | Excretory, |
| | | | Neural/Sensory |
| HE8UB86 | B25671 | WO200043495-A2 | Cancer |
| HNHKY10 | B25672 | WO200043495-A2 | Immune/Hematopoietic |
| HNHLB93 | B25673 | WO200043495-A2 | Immune/Hematopoietic |
| HNHON23 | B25674 | WO200043495-A2 | Immune/Hematopoietic, |
| | | | Musculoskeletal |
| HTEPG70 | B25675 | WO200043495-A2 | Reproductive |
| HNHOJ75 | B25676 | WO200043495-A2 | Immune/Hematopoietic |
| HDTIT10 | B25677 | WO200043495-A2 | Cancer |
| HKAOS84 | B25678 | WO200043495-A2 | Connective/Epithelial |
| HAPUC89 | B25679 | WO200043495-A2 | Cancer |
| HWAAD63 | B25680 | WO200043495-A2 | Endocrine, |
| | | | Excretory, |
| | | | Immune/Hematopoietic |
| HUCPD31 | B25681 | WO200043495-A2 | Cancer |
| HDQHD03 | B25682 | WO200043495-A2 | Immune/Hematopoietic, |
| | | | Neural/Sensory |
| HKAKK09 | B25683 | WO200043495-A2 | Connective/Epithelial, |
| | | | Digestive, |
| | | | Mixed Fetal |
| HOCNF19 | B25684 | WO200043495-A2 | Digestive |
| HTLIT32 | B25685 | WO200043495-A2 | Reproductive |
| HODEJ32 | B25686 | WO200043495-A2 | Reproductive |
| HNHMV54 | B25687 | WO200043495-A2 | Immune/Hematopoietic |
| HODEE95 | B25688 | WO200043495-A2 | Reproductive |
| HLHAM10 | B25689 | WO200043495-A2 | Cancer |
| HNHOG73 | B25690 | WO200043495-A2 | Immune/Hematopoietic |
| HBGNM47 | B25691 | WO200043495-A2 | Cancer |
| HAUBA08 | B25692 | WO200043495-A2 | Cancer |
| HYBBE75 | B25693 | WO200043495-A2 | Musculoskeletal |
| HTLGY87 | B25694 | WO200043495-A2 | Cancer |
| HNHPD10 | B25695 | WO200043495-A2 | Immune/Hematopoietic |
| HODEI83 | B25696 | WO200043495-A2 | Reproductive |
| HMUAI20 | B25697 | WO200043495-A2 | Cancer |
| HE9OW20 | B25698 | WO200043495-A2 | Immune/Hematopoietic, |
| | | | Mixed Fetal, |
| | | | Neural/Sensory |
| HDTIT10 | B25699 | WO200043495-A2 | Cancer |
| HWAAD63 | B25700 | WO200043495-A2 | Endocrine, |
| | | | Excretory, |
| | | | Immune/Hematopoietic |
| HWAAD63 | B25701 | WO200043495-A2 | Endocrine, |
| | | | Excretory, |
| | | | Immune/Hematopoietic |
| HEMCV19 | B25703 | WO200043495-A2 | Cancer |
| HEMCV19 | B25704 | WO200043495-A2 | Cancer |
| HEMCV19 | B25705 | WO200043495-A2 | Cancer |
| HAUBA08 | B25706 | WO200043495-A2 | Cancer |
| HEMCV19 | B25707 | WO200043495-A2 | Cancer |
| HE9OW20 | B25715 | WO200043495-A2 | Immune/Hematopoietic, |
| | | | Mixed Fetal, |
| | | | Neural/Sensory |
| HT4SB02 | B27560 | WO200055175-A1 | Immune/Hematopoietic |
| HCHAC68 | B27562 | WO200055175-A1 | Cancer |
| HCHCA79 | B27563 | WO200055175-A1 | Digestive, |
| | | | Neural/Sensory, |
| | | | Reproductive |
| HCHMY57 | B27564 | WO200055175-A1 | Cancer |
| HCHOY52 | B27566 | WO200055175-A1 | Cancer |
| HCHQB93 | B27567 | WO200055175-A1 | Cancer |
| HCMSA37 | B27568 | WO200055175-A1 | Cardiovascular |
| HCMSX51 | B27570 | WO200055175-A1 | Cancer |
| HCNAI74 | B27571 | WO200055175-A1 | Digestive |
| HCPAE41 | B27578 | WO200055175-A1 | Cancer |
| HCQAQ47 | B27580 | WO200055175-A1 | Cancer |
| HCQBH72 | B27581 | WO200055175-A1 | Digestive, |
| | | | Excretory, |
| | | | Immune/Hematopoietic |
| HCQDD32 | B27585 | WO200055175-A1 | Digestive, |
| | | | Immune/Hematopoietic, |
| | | | Reproductive |
| HCQDT67 | B27586 | WO200055175-A1 | Cancer |
| HCRAY10 | B27587 | WO200055175-A1 | Cancer |
| HCRBI79 | B27589 | WO200055175-A1 | Cancer |
| HNFAD50 | B27591 | WO200055175-A1 | Cancer |
| HCRNF78 | B27592 | WO200055175-A1 | Cancer |
| HCUAF85 | B27594 | WO200055175-A1 | Immune/Hematopoietic |
| HCUBM41 | B27598 | WO200055175-A1 | Immune/Hematopoietic |
| HCUBN69 | B27599 | WO200055175-A1 | Immune/Hematopoietic |
| HCUDD64 | B27602 | WO200055175-A1 | Cancer |
| HCUEC55 | B27604 | WO200055175-A1 | Immune/Hematopoietic |
| HCUFC77 | B27607 | WO200055175-A1 | Cancer |
| HBJBR40 | B27686 | WO200055201-A1 | Immune/Hematopoietic |
| HBJCH46 | B27687 | WO200055201-A1 | Immune/Hematopoietic, |
| | | | Musculoskeletal |
| HBJFU30 | B27698 | WO200055201-A1 | Cancer |
| HBJAY14 | B27704 | WO200055201-A1 | Immune/Hematopoietic |
| HBJND04 | B27708 | WO200055201-A1 | Cancer |
| HBKEA94 | B27711 | WO200055201-A1 | Cancer |
| HBJDS79 | B27712 | WO200055201-A1 | Cancer |
| HBKEI41 | B27713 | WO200055201-A1 | Endocrine, |
| | | | Mixed Fetal, |
| | | | Reproductive |
| HBJHO83 | B27720 | WO200055201-A1 | Immune/Hematopoietic, |
| | | | Reproductive |
| HBMCT40 | B27721 | WO200055201-A1 | Cancer |
| HBMTX26 | B27724 | WO200055201-A1 | Immune/Hematopoietic |
| HBMTY48 | B27725 | WO200055201-A1 | Immune/Hematopoietic, |
| | | | Reproductive |
| HBMUD59 | B27726 | WO200055201-A1 | Cancer |
| HBMUI10 | B27727 | WO200055201-A1 | Cancer |
| HCEEU18 | B27794 | WO200055199-A1 | Cancer |
| HCDCB03 | B27795 | WO200055199-A1 | Cancer |
| HCE1G78 | B27797 | WO200055199-A1 | Cancer |
| HCDEB19 | B27799 | WO200055199-A1 | Cancer |
| HCEDR26 | B27801 | WO200055199-A1 | Digestive, |
| | | | Immune/Hematopoietic, |
| | | | Neural/Sensory |
| HCDBW67 | B27804 | WO200055199-A1 | Cancer |
| HCDDX81 | B27808 | WO200055199-A1 | Musculoskeletal |
| HBZAI75 | B27809 | WO200055199-A1 | Digestive, |
| | | | Reproductive |
| HCDEN46 | B27810 | WO200055199-A1 | Cancer |
| HCE1D45 | B27811 | WO200055199-A1 | Cancer |
| HCE1Y27 | B27813 | WO200055199-A1 | Digestive, |
| | | | Neural/Sensory, |
| | | | Reproductive |
| HCE2I23 | B27816 | WO200055199-A1 | Neural/Sensory |
| HCE2P90 | B27817 | WO200055199-A1 | Neural/Sensory |
| HCE3A54 | B27818 | WO200055199-A1 | Neural/Sensory |
| HCE3D89 | B27819 | WO200055199-A1 | Endocrine, |
| | | | Neural/Sensory |
| HCE3N23 | B27820 | WO200055199-A1 | Cancer |
| HCE4T64 | B27821 | WO200055199-A1 | Cancer |
| HCE5J64 | B27823 | WO200055199-A1 | Digestive, |
| | | | Neural/Sensory |
| HCECO77 | B27824 | WO200055199-A1 | Cancer |
| HCEDH42 | B27825 | WO200055199-A1 | Neural/Sensory |
| HCEDJ05 | B27826 | WO200055199-A1 | Neural/Sensory |
| HCEEE79 | B27829 | WO200055199-A1 | Neural/Sensory |
| HCEFH31 | B27837 | WO200055199-A1 | Cancer |
| HCDDL48 | B27838 | WO200055199-A1 | Musculoskeletal |
| HFVIC33 | B27908 | WO200055171-A1 | Cancer |
| HEMAH05 | B27909 | WO200055171-A1 | Cancer |
| HHSBI65 | B27911 | WO200055171-A1 | Cancer |
| HLEAA24 | B27917 | WO200055171-A1 | Immune/Hematopoietic |
| HPTTQ91 | B27919 | WO200055171-A1 | Cancer |
| HPMGY89 | B27923 | WO200055171-A1 | Cancer |
| H2LAO03 | B27933 | WO200055171-A1 | Cancer |
| H2MBA76 | B27937 | WO200055171-A1 | Cancer |
| H2MBF60 | B27938 | WO200055171-A1 | Cancer |
| H6BSF56 | B27939 | WO200055171-A1 | Cancer |
| H6BSM88 | B27940 | WO200055171-A1 | Cancer |
| H6EEU40 | B27941 | WO200055171-A1 | Cancer |
| HACAB68 | B27943 | WO200055171-A1 | Connective/Epithelial, |
| | | | Immune/Hematopoietic |
| HACBA04 | B27945 | WO200055171-A1 | Cancer |
| HACBJ11 | B27946 | WO200055171-A1 | Cancer |
| HACBS86 | B27947 | WO200055171-A1 | Cancer |
| HACBT91 | B27948 | WO200055171-A1 | Cancer |
| HADAB60 | B27951 | WO200055171-A1 | Cancer |
| HADDE71 | B27956 | WO200055171-A1 | Cancer |
| HAGFU31 | B28014 | WO200055177-A2 | Neural/Sensory |
| HAPBR13 | B28017 | WO200055177-A2 | Cancer |
| HAQBG57 | B28020 | WO200055177-A2 | Cancer |
| HARAE26 | B28022 | WO200055177-A2 | Neural/Sensory |
| HAHEM51 | B28032 | WO200055177-A2 | Cardiovascular |
| HAICL90 | B28035 | WO200055177-A2 | Digestive, |
| | | | Immune/Hematopoietic, |
| | | | Reproductive |
| HAMFC67 | B28038 | WO200055177-A2 | Cancer |
| HAPBU09 | B28041 | WO200055177-A2 | Cancer |
| HAPNL62 | B28043 | WO200055177-A2 | Cancer |
| HAPNY10 | B28045 | WO200055177-A2 | Cancer |
| HAPQU71 | B28048 | WO200055177-A2 | Cancer |
| HARAT69 | B28054 | WO200055177-A2 | Cancer |
| HAGEU26 | B28059 | WO200055177-A2 | Neural/Sensory |
| HANGB24 | B28060 | WO200055177-A2 | Cancer |
| HNGER85 | B28286 | WO200058355-A1 | Immune/Hematopoietic |
| HNGET33 | B28287 | WO200058355-A1 | Immune/Hematopoietic |
| HNGFA25 | B28292 | WO200058355-A1 | Immune/Hematopoietic |
| HNGFG04 | B28297 | WO200058355-A1 | Immune/Hematopoietic |
| HNGFG74 | B28298 | WO200058355-A1 | Immune/Hematopoietic |
| HNGFI21 | B28301 | WO200058355-A1 | Cancer |
| HNGFM31 | B28302 | WO200058355-A1 | Immune/Hematopoietic |
| HCUCK44 | B28303 | WO200058355-A1 | Cancer |
| HNGFQ18 | B28304 | WO200058355-A1 | Immune/Hematopoietic |
| HNGFR54 | B28305 | WO200058355-A1 | Immune/Hematopoietic |
| HNGGF13 | B28309 | WO200058355-A1 | Immune/Hematopoietic |
| HNGGL11 | B28311 | WO200058355-A1 | Immune/Hematopoietic |
| HNGGP65 | B28312 | WO200058355-A1 | Immune/Hematopoietic |
| HNGHM47 | B28316 | WO200058355-A1 | Immune/Hematopoietic |
| HNGIH40 | B28318 | WO200058355-A1 | Immune/Hematopoietic |
| HNGIM83 | B28321 | WO200058355-A1 | Immune/Hematopoietic |
| HNGIS27 | B28322 | WO200058355-A1 | Immune/Hematopoietic |
| HADFB84 | B28707 | WO200055198-A1 | Cancer |
| HADFD01 | B28708 | WO200055198-A1 | Cancer |
| HADFK11 | B28709 | WO200055198-A1 | Connective/Epithelial |
| HADFT44 | B28710 | WO200055198-A1 | Connective/Epithelial, |
| | | | Mixed Fetal, |
| | | | Neural/Sensory |
| HADGD93 | B28714 | WO200055198-A1 | Cardiovascular, |
| | | | Connective/Epithelial |
| HAFBB15 | B28716 | WO200055198-A1 | Cancer |
| HAGAB62 | B28718 | WO200055198-A1 | Cancer |
| HAGAF75 | B28720 | WO200055198-A1 | Digestive, |
| | | | Neural/Sensory |
| HAGAZ36 | B28722 | WO200055198-A1 | Neural/Sensory |
| H2CBH91 | B28725 | WO200055198-A1 | Cancer |
| HAGBV29 | B28730 | WO200055198-A1 | Immune/Hematopoietic, |
| | | | Neural/Sensory |
| HAGCH67 | B28732 | WO200055198-A1 | Neural/Sensory |
| HAGCI69 | B28733 | WO200055198-A1 | Neural/Sensory, |
| | | | Reproductive |
| HAGCT33 | B28734 | WO200055198-A1 | Immune/Hematopoietic, |
| | | | Mixed Fetal, |
| | | | Neural/Sensory |
| HAGDG84 | B28737 | WO200055198-A1 | Immune/Hematopoietic, |
| | | | Neural/Sensory |
| HAGDO70 | B28743 | WO200055198-A1 | Cancer |
| HAGDW68 | B28746 | WO200055198-A1 | Endocrine, |
| | | | Neural/Sensory |
| HAGEG10 | B28748 | WO200055198-A1 | Cancer |
| HAGEK37 | B28750 | WO200055198-A1 | Cancer |
| HTADO61 | B29803 | WO200061779-A1 | Cancer |
| HELDH39 | B29805 | WO200061779-A1 | Cancer |
| HSLCV16 | B29806 | WO200061779-A1 | Cancer |
| HTOJL95 | B29807 | WO200061779-A1 | Cancer |
| HOEBK60 | B29810 | WO200061779-A1 | Cancer |
| HSAWN53 | B29813 | WO200061779-A1 | Immune/Hematopoietic |
| HORBS82 | B29814 | WO200061779-A1 | Cancer |
| HORBV76 | B29815 | WO200061779-A1 | Cardiovascular, |
| | | | Immune/Hematopoietic, |
| | | | Reproductive |
| HTEHA56 | B29822 | WO200061779-A1 | Cancer |
| HMWER46 | B29828 | WO200061779-A1 | Cancer |
| HPRAD30 | B29829 | WO200061779-A1 | Cancer |
| HTLDD89 | B29832 | WO200061779-A1 | Reproductive |
| HMCJC19 | B29835 | WO200061779-A1 | Immune/Hematopoietic |
| HROBW46 | B29841 | WO200061779-A1 | Digestive, |
| | | | Immune/Hematopoietic |
| HSOBB94 | B29842 | WO200061779-A1 | Cancer |
| HSOBP75 | B29844 | WO200061779-A1 | Cancer |
| HNHKS19 | B29848 | WO200061779-A1 | Immune/Hematopoietic, |
| | | | Reproductive |
| HNHKV56 | B29849 | WO200061779-A1 | Immune/Hematopoietic |
| HWLIL31 | B29850 | WO200061779-A1 | Cancer |
| HMVBC31 | B32002 | WO200058350-A1 | Cancer |
| HMVBC84 | B32003 | WO200058350-A1 | Digestive, |
| | | | Immune/Hematopoietic, |
| | | | Neural/Sensory |
| HMWAO82 | B32006 | WO200058350-A1 | Immune/Hematopoietic |
| HMWBK35 | B32008 | WO200058350-A1 | Cancer |
| HHENT16 | B32010 | WO200058350-A1 | Cancer |
| HMWEF46 | B32020 | WO200058350-A1 | Immune/Hematopoietic |
| HMWEX02 | B32022 | WO200058350-A1 | Cancer |
| HKGCK41 | B32027 | WO200058350-A1 | Cancer |
| HMWHR36 | B32029 | WO200058350-A1 | Immune/Hematopoietic |
| HMWIQ26 | B32031 | WO200058350-A1 | Cancer |
| HMWIU49 | B32032 | WO200058350-A1 | Cancer |
| HMWJJ64 | B32035 | WO200058350-A1 | Cancer |
| HNEAK38 | B32040 | WO200058350-A1 | Immune/Hematopoietic |
| HNECD52 | B32043 | WO200058350-A1 | Immune/Hematopoietic, |
| | | | Neural/Sensory |
| HNECL75 | B32045 | WO200058350-A1 | Cancer |
| HNECW49 | B32046 | WO200058350-A1 | Immune/Hematopoietic |
| HNEDA05 | B32048 | WO200058350-A1 | Immune/Hematopoietic |
| HETKD92 | B32371 | WO200047602-A1 | Cancer |
| HNTSN12 | B32372 | WO200047602-A1 | Cancer |
| HMQBV64 | B32373 | WO200047602-A1 | Cancer |
| HTELM16 | B32374 | WO200047602-A1 | Reproductive |
| HSDFJ26 | B32375 | WO200047602-A1 | Cancer |
| HNGND37 | B32376 | WO200047602-A1 | Cancer |
| HWBDV80 | B32377 | WO200047602-A1 | Cancer |
| HDPOR60 | B32378 | WO200047602-A1 | Cancer |
| HWBFY57 | B32379 | WO200047602-A1 | Digestive, |
| | | | Immune/Hematopoietic |
| HNHOL24 | B32380 | WO200047602-A1 | Immune/Hematopoietic |
| HWHIB26 | B32381 | WO200047602-A1 | Cancer |
| HHAAF20 | B32382 | WO200047602-A1 | Cancer |
| HNHNE04 | B32383 | WO200047602-A1 | Immune/Hematopoietic |
| HSAAO65 | B32384 | WO200047602-A1 | Cancer |
| HTENO07 | B32385 | WO200047602-A1 | Reproductive |
| HTLHI35 | B32386 | WO200047602-A1 | Immune/Hematopoietic, |
| | | | Musculoskeletal, |
| | | | Reproductive |
| HTLHY14 | B32387 | WO200047602-A1 | Immune/Hematopoietic, |
| | | | Neural/Sensory, |
| | | | Reproductive |
| HTXKY63 | B32388 | WO200047602-A1 | Immune/Hematopoietic |
| HOUDC53 | B32389 | WO200047602-A1 | Cancer |
| HWLGV78 | B32390 | WO200047602-A1 | Cancer |
| HCGLB30 | B32391 | WO200047602-A1 | Cancer |
| HTELP17 | B32392 | WO200047602-A1 | Cancer |
| HFXBS43 | B32393 | WO200047602-A1 | Neural/Sensory |
| HNGOM56 | B32394 | WO200047602-A1 | Immune/Hematopoietic |
| HTXON32 | B32395 | WO200047602-A1 | Immune/Hematopoietic |
| HDQHO40 | B32396 | WO200047602-A1 | Cancer |
| HKBAB11 | B32397 | WO200047602-A1 | Immune/Hematopoietic |
| HRAAN56 | B32398 | WO200047602-A1 | Excretory, |
| | | | Reproductive |
| HFIDS78 | B32399 | WO200047602-A1 | Connective/Epithelial, |
| | | | Digestive, |
| | | | Musculoskeletal |
| HSDIB20 | B32400 | WO200047602-A1 | Cancer |
| HHEPU04 | B32401 | WO200047602-A1 | Cancer |
| HNGKN89 | B32402 | WO200047602-A1 | Immune/Hematopoietic |
| HE9TH18 | B32403 | WO200047602-A1 | Cancer |
| HHFHM89 | B32404 | WO200047602-A1 | Cancer |
| HASAV70 | B32405 | WO200047602-A1 | Cancer |
| HSDFJ26 | B32406 | WO200047602-A1 | Cancer |
| HODAA16 | B32407 | WO200047602-A1 | Cancer |
| HODAA16 | B32408 | WO200047602-A1 | Cancer |
| HGBIB74 | B32409 | WO200047602-A1 | Cancer |
| HCRMU04 | B32410 | WO200047602-A1 | Cancer |
| HSAAO65 | B32411 | WO200047602-A1 | Cancer |
| HSAAO65 | B32412 | WO200047602-A1 | Cancer |
| HSMBB92 | B32413 | WO200047602-A1 | Cancer |
| HHEPU04 | B32414 | WO200047602-A1 | Cancer |
| HLDNA86 | B32415 | WO200047602-A1 | Cancer |
| HE9TH18 | B32416 | WO200047602-A1 | Cancer |
| HHFHM33 | B32447 | WO200047602-A1 | Cancer |
| HUUAV63 | B32481 | WO200047602-A1 | Cancer |
| HE2CJ53 | B33721 | WO200056753-A1 | Cancer |
| HE2HF76 | B33724 | WO200056753-A1 | Cancer |
| HDTDE66 | B33729 | WO200056753-A1 | Cancer |
| HDTKJ29 | B33735 | WO200056753-A1 | Cancer |
| HDTLM18 | B33736 | WO200056753-A1 | Immune/Hematopoietic |
| HE2AI94 | B33740 | WO200056753-A1 | Cancer |
| HE2BD72 | B33741 | WO200056753-A1 | Cancer |
| HE2CH58 | B33744 | WO200056753-A1 | Digestive, |
| | | | Mixed Fetal |
| HE2NW57 | B33753 | WO200056753-A1 | Mixed Fetal |
| HE2PJ56 | B33755 | WO200056753-A1 | Cancer |
| HE2PO93 | B33756 | WO200056753-A1 | Cancer |
| HE6AU52 | B33757 | WO200056753-A1 | Mixed Fetal |
| HAEAV42 | B33758 | WO200056753-A1 | Cancer |
| HE2AT61 | B33759 | WO200056753-A1 | Cancer |
| HE2CK47 | B33761 | WO200056753-A1 | Cancer |
| HE2DJ84 | B33763 | WO200056753-A1 | Cancer |
| HE2CJ53 | B33770 | WO200056753-A1 | Cancer |
| HSHAS72 | B33832 | WO200056753-A1 | Cancer |
| HEMDR05 | B33845 | WO200056881-A1 | Cardiovascular, |
| | | | Digestive, |
| | | | Immune/Hematopoietic |
| HADXA10 | B33846 | WO200056881-A1 | Cancer |
| HEOMF59 | B33847 | WO200056881-A1 | Immune/Hematopoietic |
| HEONP08 | B33854 | WO200056881-A1 | Immune/Hematopoietic |
| HEPAD15 | B33855 | WO200056881-A1 | Endocrine, |
| | | | Reproductive |
| HEIAC52 | B33860 | WO200056881-A1 | Cancer |
| HEQAP92 | B33862 | WO200056881-A1 | Cancer |
| HEQBM94 | B33865 | WO200056881-A1 | Cancer |
| HETAA62 | B33870 | WO200056881-A1 | Cancer |
| HETEY67 | B33873 | WO200056881-A1 | Connective/Epithelial, |
| | | | Reproductive |
| HETDP76 | B33874 | WO200056881-A1 | Cancer |
| HEQBF89 | B33875 | WO200056881-A1 | Reproductive |
| HETIN36 | B33877 | WO200056881-A1 | Cancer |
| HFAUA23 | B33881 | WO200056881-A1 | Cancer |
| HFCAG75 | B33882 | WO200056881-A1 | Cancer |
| HFCAQ17 | B33883 | WO200056881-A1 | Cancer |
| HFCDN13 | B33887 | WO200056881-A1 | Cancer |
| HFCDT67 | B33888 | WO200056881-A1 | Cancer |
| HFCEI04 | B33891 | WO200056881-A1 | Neural/Sensory |
| HTSGY89 | B33946 | WO200056881-A1 | Cancer |
| HFCAQ17 | B33947 | WO200056881-A1 | Cancer |
| HGLAH86 | B33965 | WO200056765-A1 | Immune/Hematopoietic |
| HHEBP28 | B33971 | WO200056765-A1 | Cancer |
| HHEMC55 | B33973 | WO200056765-A1 | Immune/Hematopoietic |
| HHEMM20 | B33974 | WO200056765-A1 | Immune/Hematopoietic |
| HHEMP35 | B33976 | WO200056765-A1 | Cancer |
| HHEMZ08 | B33977 | WO200056765-A1 | Cancer |
| HHENR74 | B33980 | WO200056765-A1 | Immune/Hematopoietic |
| HHEOK77 | B33983 | WO200056765-A1 | Cancer |
| HHEQI04 | B33986 | WO200056765-A1 | Connective/Epithelial, |
| | | | Excretory, |
| | | | Immune/Hematopoietic |
| HHFBA31 | B33987 | WO200056765-A1 | Cancer |
| HHFFF87 | B33992 | WO200056765-A1 | Cancer |
| HHFFL34 | B33993 | WO200056765-A1 | Cancer |
| HHFFS40 | B33994 | WO200056765-A1 | Cancer |
| HHGBF91 | B34005 | WO200056765-A1 | Cancer |
| HE9NB82 | B34092 | WO200056755-A1 | Cancer |
| HEAAC21 | B34095 | WO200056755-A1 | Cancer |
| HEAAM54 | B34100 | WO200056755-A1 | Reproductive |
| HEAAU28 | B34102 | WO200056755-A1 | Reproductive |
| HEBAT05 | B34104 | WO200056755-A1 | Cancer |
| HEBCN80 | B34107 | WO200056755-A1 | Neural/Sensory |
| HEBCY54 | B34108 | WO200056755-A1 | Cancer |
| HEBDW31 | B34111 | WO200056755-A1 | Cancer |
| HEBFL36 | B34112 | WO200056755-A1 | Neural/Sensory |
| HEBGE07 | B34114 | WO200056755-A1 | Neural/Sensory |
| HEBGE23 | B34115 | WO200056755-A1 | Cancer |
| HEGAI20 | B34119 | WO200056755-A1 | Reproductive |
| HEBCI18 | B34121 | WO200056755-A1 | Digestive, |
| | | | Immune/Hematopoietic, |
| | | | Neural/Sensory |
| HEBDF90 | B34125 | WO200056755-A1 | Cancer |
| HELDK79 | B34127 | WO200056755-A1 | Cardiovascular |
| HELEL76 | B34130 | WO200056755-A1 | Cancer |
| HELFO30 | B34131 | WO200056755-A1 | Cancer |
| HEMCJ80 | B34138 | WO200056755-A1 | Cancer |
| HDPAR73 | B34201 | WO200056755-A1 | Cancer |
| HDPAR73 | B34202 | WO200056755-A1 | Cancer |
| HATBI94 | B34222 | WO200055352-A2 | Cancer |
| HATCB45 | B34224 | WO200055352-A2 | Endocrine, |
| | | | Immune/Hematopoietic |
| HATDW05 | B34229 | WO200055352-A2 | Endocrine |
| HATEH20 | B34231 | WO200055352-A2 | Cancer |
| HAWBA65 | B34233 | WO200055352-A2 | Cancer |
| HBBBA42 | B34236 | WO200055352-A2 | Cancer |
| HBBBE83 | B34238 | WO200055352-A2 | Cancer |
| HBBMA11 | B34239 | WO200055352-A2 | Neural/Sensory |
| HBCGE46 | B34244 | WO200055352-A2 | Musculoskeletal |
| HBGML95 | B34249 | WO200055352-A2 | Reproductive |
| HBHAA05 | B34251 | WO200055352-A2 | Neural/Sensory |
| HBHAA53 | B34252 | WO200055352-A2 | Neural/Sensory |
| HBIAA59 | B34253 | WO200055352-A2 | Cancer |
| HBICW51 | B34262 | WO200055352-A2 | Digestive, |
| | | | Immune/Hematopoietic, |
| | | | Neural/Sensory |
| HFCET43 | B34299 | WO200056883-A1 | Cancer |
| HFEAG55 | B34302 | WO200056883-A1 | Cancer |
| HFEAY59 | B34304 | WO200056883-A1 | Connective/Epithelial |
| HFFAV61 | B34308 | WO200056883-A1 | Neural/Sensory |
| HFGAN63 | B34312 | WO200056883-A1 | Cancer |
| HFICH70 | B34316 | WO200056883-A1 | Musculoskeletal |
| HFIHQ57 | B34317 | WO200056883-A1 | Musculoskeletal, |
| | | | Reproductive |
| HFIHZ75 | B34318 | WO200056883-A1 | Cancer |
| HFIJA29 | B34321 | WO200056883-A1 | Cancer |
| HFIJD81 | B34322 | WO200056883-A1 | Cancer |
| HFIUK66 | B34324 | WO200056883-A1 | Cancer |
| HFIXC39 | B34326 | WO200056883-A1 | Cancer |
| HFIXC69 | B34327 | WO200056883-A1 | Cancer |
| HLWAU42 | B34329 | WO200056883-A1 | Cancer |
| HFIZF51 | B34331 | WO200056883-A1 | Musculoskeletal |
| HFKDX53 | B34333 | WO200056883-A1 | Cancer |
| HFKEG63 | B34335 | WO200056883-A1 | Excretory |
| HFKES05 | B34336 | WO200056883-A1 | Cancer |
| HFKES35 | B34337 | WO200056883-A1 | Cancer |
| HFKEU12 | B34338 | WO200056883-A1 | Excretory |
| HFOYR54 | B34344 | WO200056883-A1 | Cancer |
| HFPBJ64 | B34347 | WO200056883-A1 | Musculoskeletal, |
| | | | Neural/Sensory |
| HFXBV67 | B34441 | WO200056767-A1 | Digestive, |
| | | | Neural/Sensory |
| HFXBY20 | B34442 | WO200056767-A1 | Neural/Sensory |
| HFXGT51 | B34462 | WO200056767-A1 | Neural/Sensory |
| HFXGW04 | B34463 | WO200056767-A1 | Cancer |
| HFXHL83 | B34466 | WO200056767-A1 | Neural/Sensory |
| HFXJB21 | B34468 | WO200056767-A1 | Neural/Sensory |
| HFXJN93 | B34469 | WO200056767-A1 | Neural/Sensory |
| HFXJT53 | B34470 | WO200056767-A1 | Cancer |
| HFXLK91 | B34472 | WO200056767-A1 | Cancer |
| HFXHM49 | B34473 | WO200056767-A1 | Neural/Sensory |
| HGBDV35 | B34474 | WO200056767-A1 | Cancer |
| HEPCU48 | B34476 | WO200056767-A1 | Cancer |
| HGBGN34 | B34478 | WO200056767-A1 | Connective/Epithelial, |
| | | | Digestive, |
| | | | Reproductive |
| HGBGX31 | B34479 | WO200056767-A1 | Cancer |
| HGBHP91 | B34482 | WO200056767-A1 | Digestive |
| HCEFN51 | B34580 | WO200056751-A1 | Cancer |
| HCEFZ82 | B34581 | WO200056751-A1 | Cancer |
| HCEJL08 | B34585 | WO200056751-A1 | Cancer |
| HCENN67 | B34588 | WO200056751-A1 | Digestive, |
| | | | Endocrine, |
| | | | Neural/Sensory |
| HCEPC90 | B34592 | WO200056751-A1 | Neural/Sensory |
| HCETL19 | B34597 | WO200056751-A1 | Immune/Hematopoietic, |
| | | | Neural/Sensory, |
| | | | Reproductive |
| HCFAT42 | B34602 | WO200056751-A1 | Immune/Hematopoietic |
| HCFAT66 | B34603 | WO200056751-A1 | Immune/Hematopoietic |
| HCFBM77 | B34605 | WO200056751-A1 | Immune/Hematopoietic |
| HCFLJ52 | B34611 | WO200056751-A1 | Cancer |
| HCFLP48 | B34613 | WO200056751-A1 | Immune/Hematopoietic |
| HCFLQ12 | B34614 | WO200056751-A1 | Cancer |
| HCFMA39 | B34617 | WO200056751-A1 | Immune/Hematopoietic |
| HCFML07 | B34619 | WO200056751-A1 | Cancer |
| HCFMX88 | B34620 | WO200056751-A1 | Immune/Hematopoietic, |
| | | | Neural/Sensory |
| HCFNN16 | B34623 | WO200056751-A1 | Cancer |
| HCFNN75 | B34624 | WO200056751-A1 | Cancer |
| HLYBI48 | B34774 | WO200058356-A1 | Immune/Hematopoietic |
| HFKES35 | B34777 | WO200058356-A1 | Cancer |
| HLYBU15 | B34781 | WO200058356-A1 | Immune/Hematopoietic |
| HLYDX01 | B34789 | WO200058356-A1 | Cancer |
| HLYEA60 | B34790 | WO200058356-A1 | Cancer |
| HLYEU59 | B34793 | WO200058356-A1 | Immune/Hematopoietic |
| HLYGE16 | B34794 | WO200058356-A1 | Cancer |
| HLYGV19 | B34795 | WO200058356-A1 | Cancer |
| HLYGY91 | B34796 | WO200058356-A1 | Cancer |
| HMADJ14 | B34797 | WO200058356-A1 | Connective/Epithelial, |
| | | | Immune/Hematopoietic, |
| | | | Musculoskeletal |
| HMAGF01 | B34798 | WO200058356-A1 | Cancer |
| HMDAB44 | B34806 | WO200058356-A1 | Neural/Sensory |
| HMDAE88 | B34808 | WO200058356-A1 | Neural/Sensory |
| HMDAG62 | B34809 | WO200058356-A1 | Cancer |
| HMDAK20 | B34810 | WO200058356-A1 | Neural/Sensory |
| HMECM77 | B34815 | WO200058356-A1 | Cardiovascular |
| HMECQ59 | B34816 | WO200058356-A1 | Cancer |
| HMEEZ07 | B34821 | WO200058356-A1 | Cardiovascular, |
| | | | Reproductive |
| HDPCV29 | B34856 | WO200056766-A1 | Immune/Hematopoietic |
| HDPCW16 | B34857 | WO200056766-A1 | Cancer |
| HDPFG13 | B34859 | WO200056766-A1 | Cancer |
| HDPFU43 | B34860 | WO200056766-A1 | Cancer |
| HDPFZ05 | B34861 | WO200056766-A1 | Immune/Hematopoietic, |
| | | | Neural/Sensory. |
| HDPGA84 | B34862 | WO200056766-A1 | Cancer |
| HDPIH25 | B34864 | WO200056766-A1 | Cancer |
| HDPKC55 | B34866 | WO200056766-A1 | Cardiovascular, |
| | | | Immune/Hematopoietic, |
| | | | Reproductive |
| HDPNC21 | B34868 | WO200056766-A1 | Cancer |
| HDPOL37 | B34869 | WO200056766-A1 | Immune/Hematopoietic, |
| | | | Reproductive |
| HDPSZ07 | B34871 | WO200056766-A1 | Immune/Hematopoietic |
| HDPXN20 | B34872 | WO200056766-A1 | Immune/Hematopoietic |
| HDQGN08 | B34874 | WO200056766-A1 | Immune/Hematopoietic |
| HDPGE24 | B34877 | WO200056766-A1 | Cancer |
| HDPJV53 | B34878 | WO200056766-A1 | Immune/Hematopoietic |
| HDPOC24 | B34881 | WO200056766-A1 | Cancer |
| HDPPC19 | B34883 | WO200056766-A1 | Immune/Hematopoietic |
| HBCAO31 | B34886 | WO200056766-A1 | Cancer |
| HDQGD06 | B34889 | WO200056766-A1 | Cancer |
| HDRAA17 | B34890 | WO200056766-A1 | Cancer |
| HDRAC68 | B34891 | WO200056766-A1 | Cancer |
| HDSAH37 | B34893 | WO200056766-A1 | Connective/Epithelial |
| HDSAP15 | B34896 | WO200056766-A1 | Cancer |
| HDTAS57 | B34897 | WO200056766-A1 | Cancer |
| HDPFU43 | B34916 | WO200056766-A1 | Cancer |
| HDPKC55 | B34932 | WO200056766-A1 | Cardiovascular, |
| | | | Immune/Hematopoietic, |
| | | | Reproductive |
| HPRCB54 | B36696 | WO200071150-A1 | Cancer |
| HMQAT69 | B37348 | WO200058335-A1 | Cancer |
| HMQBL90 | B37349 | WO200058335-A1 | Digestive, |
| | | | Immune/Hematopoietic |
| HMQCX41 | B37354 | WO200058335-A1 | Immune/Hematopoietic |
| HMQDU07 | B37356 | WO200058335-A1 | Digestive, |
| | | | Immune/Hematopoietic, |
| | | | Musculoskeletal |
| HMSDI67 | B37365 | WO200058335-A1 | Digestive, |
| | | | Immune/Hematopoietic |
| HMSHC86 | B37372 | WO200058335-A1 | Immune/Hematopoietic |
| HMSII36 | B37376 | WO200058335-A1 | Immune/Hematopoietic |
| HMSIT42 | B37377 | WO200058335-A1 | Digestive, |
| | | | Immune/Hematopoietic, |
| | | | Neural/Sensory |
| HMSKQ91 | B37381 | WO200058335-A1 | Immune/Hematopoietic |
| HMTAT36 | B37384 | WO200058335-A1 | Cancer |
| HMUBK53 | B37390 | WO200058335-A1 | Cancer |
| HMUBO15 | B37392 | WO200058335-A1 | Cancer |
| HMUBZ15 | B37393 | WO200058335-A1 | Cancer |
| HMSLF15 | B37984 | WO200055371-A1 | Cancer |
| HKAET41 | B37985 | WO200055371-A1 | Connective/Epithelial, |
| | | | Digestive, |
| | | | Reproductive |
| HE9RJ42 | B37987 | WO200055371-A1 | Mixed Fetal |
| HDPAS92 | B37988 | WO200055371-A1 | Cancer |
| HATDF29 | B37989 | WO200055371-A1 | Cancer |
| HWLHH15 | B37990 | WO200055371-A1 | Digestive |
| HBXFL29 | B37991 | WO200055371-A1 | Cancer |
| HKGBF67 | B37992 | WO200055371-A1 | Cancer |
| HWHGP71 | B37993 | WO200055371-A1 | Connective/Epithelial, |
| | | | Immune/Hematopoietic, |
| | | | Reproductive |
| HLWCU38 | B37994 | WO200055371-A1 | Cancer |
| HMTAX46 | B37995 | WO200055371-A1 | Cancer |
| HIBEU15 | B37996 | WO200055371-A1 | Excretory, |
| | | | Immune/Hematopoietic, |
| | | | Neural/Sensory |
| HDPQV66 | B37997 | WO200055371-A1 | Cancer |
| HFXGW52 | B37998 | WO200055371-A1 | Neural/Sensory |
| HHEQR55 | B37999 | WO200055371-A1 | Immune/Hematopoietic |
| HNHNW84 | B38000 | WO200055371-A1 | Immune/Hematopoietic |
| HAJBX74 | B38001 | WO200055371-A1 | Cancer |
| HCUGE72 | B38002 | WO200055371-A1 | Cancer |
| HTEQI22 | B38003 | WO200055371-A1 | Cancer |
| HDPYE41 | B38004 | WO200055371-A1 | Immune/Hematopoietic |
| HDTII23 | B38005 | WO200055371-A1 | Immune/Hematopoietic |
| HAMFL84 | B38007 | WO200055371-A1 | Cancer |
| HTELW37 | B38008 | WO200055371-A1 | Reproductive |
| HNGOU56 | B38009 | WO200055371-A1 | Immune/Hematopoietic |
| HOUHD63 | B38010 | WO200055371-A1 | Cancer |
| HPJCX13 | B38011 | WO200055371-A1 | Cancer |
| HNHCT15 | B38012 | WO200055371-A1 | Cancer |
| HKGBF67 | B38013 | WO200055371-A1 | Cancer |
| HWHGP71 | B38014 | WO200055371-A1 | Connective/Epithelial, |
| | | | Immune/Hematopoietic, |
| | | | Reproductive |
| HTEQI22 | B38016 | WO200055371-A1 | Cancer |
| HJBCI01 | B38017 | WO200055371-A1 | Cancer |
| HTSFV18 | B38018 | WO200055371-A1 | Cancer |
| HPJBF63 | B38019 | WO200055371-A1 | Cancer |
| HWHGP71 | B38044 | WO200055371-A1 | Connective/Epithelial, |
| | | | Immune/Hematopoietic, |
| | | | Reproductive |
| HNEDU46 | B38119 | WO200058468-A2 | Cancer |
| HNFDY31 | B38124 | WO200058468-A2 | Cancer |
| HNFEA17 | B38125 | WO200058468-A2 | Cancer |
| HNFET12 | B38127 | WO200058468-A2 | Immune/Hematopoietic |
| HNFGR08 | B38129 | WO200058468-A2 | Immune/Hematopoietic |
| HNFGW37 | B38130 | WO200058468-A2 | Immune/Hematopoietic |
| HNFGW53 | B38131 | WO200058468-A2 | Cancer |
| HNFHA34 | B38132 | WO200058468-A2 | Cancer |
| HNFJE27 | B38137 | WO200058468-A2 | Immune/Hematopoietic |
| HNGAM58 | B38143 | WO200058468-A2 | Immune/Hematopoietic |
| HNGAT83 | B38144 | WO200058468-A2 | Immune/Hematopoietic |
| HNGBE63 | B38148 | WO200058468-A2 | Immune/Hematopoietic |
| HNGBH53 | B38149 | WO200058468-A2 | Immune/Hematopoietic |
| HNGBJ74 | B38150 | WO200058468-A2 | Immune/Hematopoietic |
| HNGBQ61 | B38152 | WO200058468-A2 | Immune/Hematopoietic |
| HNGBW25 | B38154 | WO200058468-A2 | Immune/Hematopoietic |
| HNGCF64 | B38156 | WO200058468-A2 | Immune/Hematopoietic |
| HNGDH22 | B38158 | WO200058468-A2 | Immune/Hematopoietic |
| HNGDQ38 | B38161 | WO200058468-A2 | Immune/Hematopoietic |
| HNGDR39 | B38162 | WO200058468-A2 | Immune/Hematopoietic |
| HNGEA34 | B38165 | WO200058468-A2 | Digestive, |
| | | | Immune/Hematopoietic |
| HTOJB02 | B38205 | WO200058469-A1 | Immune/Hematopoietic |
| HSDEA26 | B38207 | WO200058469-A1 | Neural/Sensory |
| HATCF80 | B38209 | WO200058469-A1 | Cancer |
| HTOAK03 | B38215 | WO200058469-A1 | Cancer |
| HSLAB11 | B38216 | WO200058469-A1 | Cancer |
| HSJAU93 | B38218 | WO200058469-A1 | Cancer |
| HSHBT15 | B38221 | WO200058469-A1 | Cancer |
| HSLCS31 | B38234 | WO200058469-A1 | Cancer |
| HSLCS34 | B38235 | WO200058469-A1 | Cancer |
| HOBNF51 | B38237 | WO200058469-A1 | Cancer |
| HSFAM19 | B38242 | WO200058469-A1 | Cancer |
| HNHEY29 | B38245 | WO200058469-A1 | Immune/Hematopoietic |
| HTHDB20 | B38248 | WO200058469-A1 | Immune/Hematopoietic |
| HPMGM06 | B38250 | WO200058469-A1 | Digestive, |
| | | | Neural/Sensory, |
| | | | Reproductive |
| HDPMA04 | B38321 | WO200061623-A1 | Immune/Hematopoietic |
| HEMFQ46 | B38322 | WO200061623-A1 | Cancer |
| HKAJK47 | B38324 | WO200061623-A1 | Cancer |
| HCGMF16 | B38325 | WO200061623-A1 | Cancer |
| HMSGU01 | B38326 | WO200061623-A1 | Cancer |
| HNTCE26 | B38327 | WO200061623-A1 | Cancer |
| HPTTI70 | B38328 | WO200061623-A1 | Cancer |
| HNSAD53 | B38329 | WO200061623-A1 | Digestive |
| HTEBV72 | B38330 | WO200061623-A1 | Reproductive |
| HCE3Z61 | B38331 | WO200061623-A1 | Cancer |
| HSSGD52 | B38332 | WO200061623-A1 | Cancer |
| HAPSA79 | B38333 | WO200061623-A1 | Cancer |
| HASAU84 | B38334 | WO200061623-A1 | Cancer |
| HLWEA51 | B38335 | WO200061623-A1 | Cancer |
| HNFIZ34 | B38336 | WO200061623-A1 | Cancer |
| HTELS08 | B38337 | WO200061623-A1 | Reproductive |
| HTLEJ24 | B38338 | WO200061623-A1 | Cancer |
| HCEHF62 | B38339 | WO200061623-A1 | Cancer |
| HUFBY15 | B38340 | WO200061623-A1 | Digestive, |
| | | | Musculoskeletal, |
| | | | Reproductive |
| HELHD85 | B38341 | WO200061623-A1 | Cancer |
| HOFNY91 | B38342 | WO200061623-A1 | Cancer |
| HEGAK44 | B38343 | WO200061623-A1 | Cancer |
| HETBA14 | B38344 | WO200061623-A1 | Cancer |
| HBAFV19 | B38345 | WO200061623-A1 | Cancer |
| HTXDO17 | B38346 | WO200061623-A1 | Immune/Hematopoietic, |
| | | | Neural/Sensory, |
| | | | Respiratory |
| HE8DS15 | B38347 | WO200061623-A1 | Cancer |
| HLDOW79 | B38348 | WO200061623-A1 | Cardiovascular, |
| | | | Digestive |
| HOFND85 | B38349 | WO200061623-A1 | Cancer |
| HBIBU30 | B38350 | WO200061623-A1 | Cancer |
| HODFG71 | B38351 | WO200061623-A1 | Reproductive |
| HNHGE28 | B38352 | WO200061623-A1 | Cancer |
| HYASD09 | B38355 | WO200061623-A1 | Cancer |
| HDPCL63 | B38356 | WO200061623-A1 | Cancer |
| HBDAD07 | B38357 | WO200061623-A1 | Immune/Hematopoietic |
| HTOHG09 | B38361 | WO200061623-A1 | Cancer |
| HWBFX31 | B38362 | WO200061623-A1 | Cancer |
| HLHDP16 | B38363 | WO200061623-A1 | Cancer |
| HSDBC88 | B38364 | WO200061623-A1 | Cancer |
| HOVBX78 | B38365 | WO200061623-A1 | Cancer |
| HWADJ89 | B38367 | WO200061623-A1 | Immune/Hematopoietic |
| HYABE50 | B38368 | WO200061623-A1 | Cancer |
| HSJAQ17 | B38369 | WO200061623-A1 | Cancer |
| HCUGM86 | B38370 | WO200061623-A1 | Immune/Hematopoietic |
| HLDQC46 | B38371 | WO200061623-A1 | Cancer |
| HOFOA59 | B38372 | WO200061623-A1 | Reproductive |
| HFABG18 | B38373 | WO200061623-A1 | Cancer |
| HNHLY33 | B38374 | WO200061623-A1 | Immune/Hematopoietic |
| HFCFJ18 | B38375 | WO200061623-A1 | Cancer |
| HANGG89 | B38376 | WO200061623-A1 | Cancer |
| HNHOD46 | B38377 | WO200061623-A1 | Immune/Hematopoietic |
| HLYBI58 | B38379 | WO200061623-A1 | Cancer |
| HAJBG14 | B38381 | WO200061623-A1 | Cancer |
| HE9NN84 | B38382 | WO200061623-A1 | Cancer |
| HAPSA79 | B38383 | WO200061623-A1 | Cancer |
| HAPSA79 | B38384 | WO200061623-A1 | Cancer |
| HTLEJ24 | B38385 | WO200061623-A1 | Cancer |
| HEGAK44 | B38386 | WO200061623-A1 | Cancer |
| HTXDO17 | B38387 | WO200061623-A1 | Immune/Hematopoietic, |
| | | | Neural/Sensory, |
| | | | Respiratory |
| HBIBB20 | B38388 | WO200061623-A1 | Cancer |
| HSIDL71 | B38389 | WO200061623-A1 | Cancer |
| HOVBX78 | B38390 | WO200061623-A1 | Cancer |
| HYABE50 | B38391 | WO200061623-A1 | Cancer |
| HFCFJ18 | B38392 | WO200061623-A1 | Cancer |
| HPRAL78 | B38394 | WO200061623-A1 | Cancer |
| HCE5F84 | B38395 | WO200061623-A1 | Cancer |
| HAMHE82 | B38396 | WO200061623-A1 | Cancer |
| HACBZ59 | B38472 | WO200061623-A1 | Cancer |
| HACBZ59 | B38475 | WO200061623-A1 | Cancer |
| HWLQU40 | B38514 | WO200061623-A1 | Cancer |
| HFKFI35 | B38527 | WO200056882-A1 | Excretory |
| HFPCZ55 | B38529 | WO200056882-A1 | Cancer |
| HFPDR39 | B38533 | WO200056882-A1 | Cancer |
| HFPDX08 | B38536 | WO200056882-A1 | Cancer |
| HFRAB10 | B38539 | WO200056882-A1 | Excretory, |
| | | | Immune/Hematopoietic, |
| | | | Neural/Sensory |
| HFSBE94 | B38541 | WO200056882-A1 | Immune/Hematopoietic |
| HFTAR30 | B38545 | WO200056882-A1 | Cancer |
| HFTBB50 | B38546 | WO200056882-A1 | Cancer |
| HFSAY91 | B38551 | WO200056882-A1 | Cancer |
| HFSBC10 | B38552 | WO200056882-A1 | Immune/Hematopoietic, |
| | | | Mixed Fetal |
| HFTDK11 | B38555 | WO200056882-A1 | Cancer |
| HFVHW43 | B38560 | WO200056882-A1 | Digestive |
| HFXBI64 | B38567 | WO200056882-A1 | Neural/Sensory |
| HFXBL05 | B38568 | WO200056882-A1 | Mixed Fetal, |
| | | | Neural/Sensory |
| HHGBV02 | B38971 | WO200056880-A1 | Immune/Hematopoietic, |
| | | | Reproductive |
| HHGBW55 | B38972 | WO200056880-A1 | Immune/Hematopoietic, |
| | | | Reproductive |
| HHGDI12 | B38976 | WO200056880-A1 | Neural/Sensory |
| HHPBG90 | B38983 | WO200056880-A1 | Cancer |
| HHPFP26 | B38987 | WO200056880-A1 | Cancer |
| HHPGU74 | B38990 | WO200056880-A1 | Neural/Sensory |
| HHPEB61 | B38991 | WO200056880-A1 | Cancer |
| HHSBJ92 | B39002 | WO200056880-A1 | Cancer |
| HHPSE03 | B39004 | WO200056880-A1 | Neural/Sensory |
| HHSCQ67 | B39005 | WO200056880-A1 | Cancer |
| HHSDB43 | B39007 | WO200056880-A1 | Cancer |
| HHTLH79 | B39015 | WO200056880-A1 | Immune/Hematopoietic, |
| | | | Musculoskeletal, |
| | | | Neural/Sensory |
| HIABC70 | B39016 | WO200056880-A1 | Cancer |
| HIBCR82 | B39017 | WO200056880-A1 | Mixed Fetal, |
| | | | Neural/Sensory |
| HIBEC45 | B39019 | WO200056880-A1 | Cancer |
| HILCA24 | B39020 | WO200056880-A1 | Digestive, |
| | | | Immune/Hematopoietic, |
| | | | Reproductive |
| HLHBS54 | B39093 | WO200058513-A1 | Cancer |
| HLMCT95 | B39098 | WO200058513-A1 | Cancer |
| HLDRU08 | B39100 | WO200058513-A1 | Cancer |
| HLDXF43 | B39101 | WO200058513-A1 | Cancer |
| HLEAA10 | B39102 | WO200058513-A1 | Immune/Hematopoietic |
| HLHCB33 | B39104 | WO200058513-A1 | Digestive, |
| | | | Reproductive, |
| | | | Respiratory |
| HLHCF14 | B39105 | WO200058513-A1 | Connective/Epithelial, |
| | | | Respiratory |
| HLHCN51 | B39107 | WO200058513-A1 | Digestive, |
| | | | Immune/Hematopoietic, |
| | | | Respiratory |
| HLHDM38 | B39109 | WO200058513-A1 | Cancer |
| HLHEX62 | B39111 | WO200058513-A1 | Excretory, |
| | | | Immune/Hematopoietic, |
| | | | Respiratory |
| HLHSG15 | B39114 | WO200058513-A1 | Cancer |
| HLIBD74 | B39117 | WO200058513-A1 | Digestive |
| HLICO10 | B39120 | WO200058513-A1 | Cancer |
| HLJBI22 | B39121 | WO200058513-A1 | Cancer |
| HLLAX95 | B39123 | WO200058513-A1 | Immune/Hematopoietic |
| HLMBZ14 | B39127 | WO200058513-A1 | Immune/Hematopoietic |
| HLMDH01 | B39129 | WO200058513-A1 | Immune/Hematopoietic |
| HLMDU23 | B39130 | WO200058513-A1 | Immune/Hematopoietic |
| HLMFU53 | B39133 | WO200058513-A1 | Cancer |
| HLMHG68 | B39135 | WO200058513-A1 | Cancer |
| HLMIM84 | B39137 | WO200058513-A1 | Cancer |
| HLMIQ83 | B39139 | WO200058513-A1 | Immune/Hematopoietic |
| HLDRT09 | B39140 | WO200058513-A1 | Cancer |
| HE9EA10 | B39181 | WO200056754-A1 | Cancer |
| HE6CS65 | B39182 | WO200056754-A1 | Cancer |
| HE8BE20 | B39190 | WO200056754-A1 | Cancer |
| HE8BT58 | B39193 | WO200056754-A1 | Cancer |
| HE8CA13 | B39195 | WO200056754-A1 | Cancer |
| HE8FC10 | B39201 | WO200056754-A1 | Immune/Hematopoietic, |
| | | | Mixed Fetal, |
| | | | Reproductive |
| HE8FG24 | B39202 | WO200056754-A1 | Cancer |
| HE8FL24 | B39203 | WO200056754-A1 | Mixed Fetal |
| HE8MA27 | B39204 | WO200056754-A1 | Cancer |
| HE8MG56 | B39205 | WO200056754-A1 | Mixed Fetal |
| HE8QU21 | B39208 | WO200056754-A1 | Immune/Hematopoietic, |
| | | | Mixed Fetal |
| HE8UX34 | B39210 | WO200056754-A1 | Mixed Fetal |
| HE9CY05 | B39216 | WO200056754-A1 | Mixed Fetal |
| HE9DG54 | B39217 | WO200056754-A1 | Cancer |
| HE9DZ47 | B39218 | WO200056754-A1 | Endocrine, |
| | | | Immune/Hematopoietic, |
| | | | Mixed Fetal |
| HE8EX86 | B39226 | WO200056754-A1 | Cancer |
| HMEIH57 | B39310 | WO200057903-A2 | Cardiovascular, |
| | | | Immune/Hematopoietic |
| HFEBA88 | B39312 | WO200057903-A2 | Cancer |
| HMEKW44 | B39317 | WO200057903-A2 | Cardiovascular, |
| | | | Immune/Hematopoietic, |
| | | | Neural/Sensory |
| HMELM75 | B39318 | WO200057903-A2 | Cancer |
| HMIAC52 | B39322 | WO200057903-A2 | Cancer |
| HMIAL39 | B39325 | WO200057903-A2 | Cancer |
| HMIBD93 | B39329 | WO200057903-A2 | Cancer |
| HMIBE95 | B39330 | WO200057903-A2 | Neural/Sensory |
| HMMAL32 | B39344 | WO200057903-A2 | Immune/Hematopoietic |
| HMMBK55 | B39348 | WO200057903-A2 | Immune/Hematopoietic |
| HMMBR63 | B39350 | WO200057903-A2 | Cancer |
| HMMBS55 | B39351 | WO200057903-A2 | Immune/Hematopoietic, |
| | | | Reproductive |
| HMMBT47 | B39352 | WO200057903-A2 | Immune/Hematopoietic |
| HMMCD35 | B39353 | WO200057903-A2 | Immune/Hematopoietic |
| HFKCZ13 | B39362 | WO200057903-A2 | Cancer |
| HFKCZ13 | B39363 | WO200057903-A2 | Cancer |
| HOAAL10 | B39402 | WO200058340-A2 | Musculoskeletal |
| HTXCV44 | B39406 | WO200058340-A2 | Immune/Hematopoietic, |
| | | | Neural/Sensory |
| HTXDJ75 | B39407 | WO200058340-A2 | Digestive, |
| | | | Immune/Hematopoietic, |
| | | | Mixed Fetal |
| HSIDZ25 | B39410 | WO200058340-A2 | Cancer |
| HTXEN33 | B39413 | WO200058340-A2 | Immune/Hematopoietic, |
| | | | Reproductive |
| HJPDK61 | B39419 | WO200058340-A2 | Cancer |
| HNHBM16 | B39420 | WO200058340-A2 | Immune/Hematopoietic, |
| | | | Neural/Sensory |
| HNHDE58 | B39422 | WO200058340-A2 | Cancer |
| HTTDT67 | B39425 | WO200058340-A2 | Cancer |
| HTLEP55 | B39427 | WO200058340-A2 | Cancer |
| HCUBA28 | B39430 | WO200058340-A2 | Cancer |
| HSNAT08 | B39433 | WO200058340-A2 | Cancer |
| HTOEV01 | B39437 | WO200058340-A2 | Immune/Hematopoietic, |
| | | | Reproductive |
| HSQBF66 | B39439 | WO200058340-A2 | Cancer |
| HSJBY32 | B39445 | WO200058340-A2 | Immune/Hematopoietic, |
| | | | Musculoskeletal, |
| | | | Neural/Sensory |
| HPMCV30 | B39447 | WO200058340-A2 | Cancer |
| HPMDF45 | B39448 | WO200058340-A2 | Excretory, |
| | | | Immune/Hematopoietic, |
| | | | Reproductive |
| HPIBI40 | B40153 | WO200058496-A1 | Cancer |
| HRDBA20 | B40154 | WO200058496-A1 | Musculoskeletal |
| HTJMA64 | B40156 | WO200058496-A1 | Cancer |
| HTHDF86 | B40157 | WO200058496-A1 | Immune/Hematopoietic |
| HRDBA20 | B40158 | WO200058496-A1 | Musculoskeletal |
| HSAAN03 | B40161 | WO200058496-A1 | Cancer |
| HRABZ80 | B40162 | WO200058496-A1 | Excretory, |
| | | | Immune/Hematopoietic, |
| | | | Musculoskeletal |
| HPDDQ28 | B40163 | WO200058496-A1 | Endocrine, |
| | | | Musculoskeletal |
| HOSBX14 | B40166 | WO200058496-A1 | Immune/Hematopoietic, |
| | | | Musculoskeletal, |
| | | | Reproductive |
| HCRAI29 | B40168 | WO200058496-A1 | Neural/Sensory |
| HSAXI10 | B40171 | WO200058496-A1 | Digestive, |
| | | | Immune/Hematopoietic |
| HTSFV18 | B40172 | WO200058496-A1 | Cancer |
| HNHGK22 | B40174 | WO200058496-A1 | Immune/Hematopoietic |
| HPMFP48 | B40176 | WO200058496-A1 | Cancer |
| HUSGL67 | B40177 | WO200058496-A1 | Cancer |
| HOFMO16 | B40180 | WO200058496-A1 | Reproductive |
| HPMAI31 | B40182 | WO200058496-A1 | Cancer |
| HTTAP37 | B40184 | WO200058496-A1 | Immune/Hematopoietic, |
| | | | Reproductive |
| HSABA15 | B40187 | WO200058496-A1 | Cancer |
| HPEAA65 | B40188 | WO200058496-A1 | Digestive, |
| | | | Immune/Hematopoietic, |
| | | | Reproductive |
| HSSAN03 | B40189 | WO200058496-A1 | Cancer |
| HTTDG27 | B40194 | WO200058496-A1 | Reproductive |
| HTPDV75 | B40195 | WO200058496-A1 | Digestive, |
| | | | Reproductive |
| HMJAC12 | B40197 | WO200058496-A1 | Neural/Sensory |
| HTLEJ24 | B40198 | WO200058496-A1 | Cancer |
| HBAMC47 | B43415 | WO200055350-A1 | Excretory |
| HBGDH11 | B43571 | WO200055350-A1 | Cancer |
| HCHAK72 | B43572 | WO200055350-A1 | Cancer |
| HSRAB84 | B43594 | WO200055350-A1 | Cancer |
| HMWBH91 | B43612 | WO200055350-A1 | Cancer |
| HUFFG07 | B43619 | WO200055350-A1 | Cancer |
| HMEIY69 | B43625 | WO200055350-A1 | Cancer |
| HIBCN93 | B43651 | WO200055350-A1 | Cancer |
| HDPQE64 | B43656 | WO200055350-A1 | Cancer |
| HSYCY88 | B43723 | WO200055350-A1 | Cancer |
| HCMSD61 | B43779 | WO200055350-A1 | Cancer |
| H2CBK94 | B43801 | WO200055350-A1 | Digestive, |
| | | | Neural/Sensory, |
| | | | Respiratory |
| HE9NK60 | B43812 | WO200055350-A1 | Cancer |
| HTXDT74 | B43844 | WO200055350-A1 | Cancer |
| HTTKN45 | B43848 | WO200055350-A1 | Cancer |
| HSSGC06 | B43861 | WO200055350-A1 | Cancer |
| HE8AM92 | B43893 | WO200055350-A1 | Cancer |
| HWLHZ28 | B43933 | WO200055350-A1 | Cancer |
| HCEDM42 | B43935 | WO200055350-A1 | Cancer |
| HMWFM73 | B43952 | WO200055350-A1 | Cancer |
| HCHBQ27 | B44028 | WO200055350-A1 | Reproductive |
| HCHBQ27 | B44029 | WO200055350-A1 | Reproductive |
| HCEGS49 | B44338 | WO200058358-A1 | Connective/Epithelial, |
| | | | Neural/Sensory, |
| | | | Reproductive |
| HTODH57 | B44349 | WO200058358-A1 | Immune/Hematopoietic |
| HRTAR24 | B44351 | WO200058358-A1 | Digestive, |
| | | | Immune/Hematopoietic |
| HSLAW59 | B44355 | WO200058358-A1 | Immune/Hematopoietic, |
| | | | Musculoskeletal |
| HODAG07 | B44358 | WO200058358-A1 | Reproductive |
| HODBA45 | B44360 | WO200058358-A1 | Reproductive |
| HODBD79 | B44361 | WO200058358-A1 | Immune/Hematopoietic, |
| | | | Reproductive |
| HODDG72 | B44363 | WO200058358-A1 | Cancer |
| HSVAE42 | B44367 | WO200058358-A1 | Connective/Epithelial, |
| | | | Neural/Sensory |
| HNHAG83 | B44369 | WO200058358-A1 | Immune/Hematopoietic, |
| | | | Mixed Fetal, |
| | | | Musculoskeletal |
| HSIDA39 | B44374 | WO200058358-A1 | Digestive |
| HYBAW56 | B44375 | WO200058358-A1 | Musculoskeletal |
| HSATI91 | B44376 | WO200058358-A1 | Immune/Hematopoietic |
| HPWAO89 | B44379 | WO200058358-A1 | Immune/Hematopoietic, |
| | | | Reproductive |
| HOUCD12 | B44380 | WO200058358-A1 | Connective/Epithelial |
| HWTAM38 | B44381 | WO200058358-A1 | Digestive, |
| | | | Immune/Hematopoietic, |
| | | | Reproductive |
| HKGCE62 | B44597 | WO200058339-A2 | Immune/Hematopoietic |
| HKGAK45 | B44601 | WO200058339-A2 | Musculoskeletal, |
| | | | Reproductive |
| HKGBC33 | B44602 | WO200058339-A2 | Immune/Hematopoietic |
| HKGBH54 | B44606 | WO200058339-A2 | Cancer |
| HKGCK41 | B44608 | WO200058339-A2 | Cancer |
| HKGCX05 | B44610 | WO200058339-A2 | Cancer |
| HKGDA95 | B44611 | WO200058339-A2 | Cancer |
| HKIME53 | B44612 | WO200058339-A2 | Cancer |
| HKIXR91 | B44616 | WO200058339-A2 | Cancer |
| HKMLT89 | B44625 | WO200058339-A2 | Excretory, |
| | | | Immune/Hematopoietic, |
| | | | Reproductive |
| HKMMU76 | B44629 | WO200058339-A2 | Cancer |
| HL3AE69 | B44635 | WO200058339-A2 | Cancer |
| HLDBV54 | B44638 | WO200058339-A2 | Cancer |
| HLDNF18 | B44639 | WO200058339-A2 | Cancer |
| HLDOL74 | B44642 | WO200058339-A2 | Cancer |
| HKIMG23 | B44643 | WO200058339-A2 | Cancer |
| HLDBV18 | B44645 | WO200058339-A2 | Cancer |
| HMQBU44 | B44647 | WO200058339-A2 | Cancer |
| HNHDM21 | B44703 | WO200058494-A1 | Immune/Hematopoietic |
| HNHDM43 | B44704 | WO200058494-A1 | Immune/Hematopoietic |
| HNHDX28 | B44708 | WO200058494-A1 | Immune/Hematopoietic |
| HNHEG30 | B44713 | WO200058494-A1 | Immune/Hematopoietic |
| HNHEL22 | B44715 | WO200058494-A1 | Immune/Hematopoietic |
| HNHFF60 | B44720 | WO200058494-A1 | Immune/Hematopoietic |
| HTHDH18 | B44723 | WO200058494-A1 | Immune/Hematopoietic |
| HTHDP65 | B44724 | WO200058494-A1 | Cancer |
| HTHDT25 | B44725 | WO200058494-A1 | Immune/Hematopoietic |
| HTGAQ29 | B44727 | WO200058494-A1 | Immune/Hematopoietic |
| HTGAS70 | B44728 | WO200058494-A1 | Cancer |
| HNHGD95 | B44731 | WO200058494-A1 | Cardiovascular, |
| | | | Immune/Hematopoietic |
| HNHGR82 | B44733 | WO200058494-A1 | Immune/Hematopoietic |
| HSAYL24 | B44763 | WO200058336-A1 | Immune/Hematopoietic |
| HTGDS92 | B44764 | WO200058336-A1 | Cancer |
| HTWDJ17 | B44767 | WO200058336-A1 | Cancer |
| HNGJL07 | B44776 | WO200058336-A1 | Immune/Hematopoietic, |
| | | | Neural/Sensory |
| HSSGS62 | B44785 | WO200058336-A1 | Musculoskeletal, |
| | | | Reproductive |
| HOVCC73 | B44786 | WO200058336-A1 | Immune/Hematopoietic, |
| | | | Reproductive |
| HSAYO82 | B44788 | WO200058336-A1 | Endocrine, |
| | | | Immune/Hematopoietic |
| HMACT74 | B44791 | WO200058336-A1 | Immune/Hematopoietic |
| HMIAD75 | B44792 | WO200058336-A1 | Neural/Sensory |
| HUFAO92 | B44795 | WO200058336-A1 | Digestive, |
| | | | Reproductive |
| HTWFA21 | B44799 | WO200058336-A1 | Immune/Hematopoietic |
| HSDKE82 | B44802 | WO200058336-A1 | Neural/Sensory |
| HMAJS26 | B44803 | WO200058336-A1 | Cancer |
| HKGAP57 | B44811 | WO200058336-A1 | Immune/Hematopoietic |
| HCWUW24 | B44831 | WO200055176-A2 | Immune/Hematopoietic |
| HDPAE80 | B44832 | WO200055176-A2 | Cancer |
| HCUFE33 | B44833 | WO200055176-A2 | Immune/Hematopoietic |
| HCUFJ09 | B44834 | WO200055176-A2 | Cancer |
| HCUGR26 | B44840 | WO200055176-A2 | Immune/Hematopoietic |
| HCUHM71 | B44844 | WO200055176-A2 | Immune/Hematopoietic, |
| | | | Musculoskeletal |
| HCWAK88 | B44847 | WO200055176-A2 | Immune/Hematopoietic |
| HCWFK03 | B44855 | WO200055176-A2 | Cancer |
| HCWHT52 | B44858 | WO200055176-A2 | Immune/Hematopoietic |
| HCWKO32 | B44859 | WO200055176-A2 | Immune/Hematopoietic |
| HCWUF93 | B44861 | WO200055176-A2 | Cancer |
| HDACJ52 | B44865 | WO200055176-A2 | Cancer |
| HDFAB86 | B44866 | WO200055176-A2 | Mixed Fetal, |
| | | | Neural/Sensory |
| HDHAA55 | B44870 | WO200055176-A2 | Immune/Hematopoietic, |
| | | | Neural/Sensory |
| HDHEB12 | B44871 | WO200055176-A2 | Immune/Hematopoietic, |
| | | | Neural/Sensory |
| HDHIA16 | B44874 | WO200055176-A2 | Cancer |
| HDHIA26 | B44875 | WO200055176-A2 | Neural/Sensory |
| HARNB17 | B44909 | WO200055176-A2 | Cancer |
| HBKEE60 | B44917 | WO200055200-A1 | Digestive |
| HBMWJ92 | B44920 | WO200055200-A1 | Cancer |
| HBMXW83 | B44924 | WO200055200-A1 | Cancer |
| HCE3R01 | B44926 | WO200055200-A1 | Cancer |
| HBNBJ76 | B44930 | WO200055200-A1 | Cancer |
| HBQAC72 | B44935 | WO200055200-A1 | Neural/Sensory |
| HBSAJ63 | B44937 | WO200055200-A1 | Cancer |
| HATDE03 | B44938 | WO200055200-A1 | Cancer |
| HBSDD24 | B44939 | WO200055200-A1 | Cancer |
| HBWBD25 | B44940 | WO200055200-A1 | Immune/Hematopoietic, |
| | | | Neural/Sensory |
| HBXBM24 | B44943 | WO200055200-A1 | Neural/Sensory |
| HBXBM78 | B44944 | WO200055200-A1 | Cancer |
| HBNAX40 | B44947 | WO200055200-A1 | Cancer |
| HBXCQ03 | B44949 | WO200055200-A1 | Cancer |
| HBXFI33 | B44955 | WO200055200-A1 | Immune/Hematopoietic, |
| | | | Neural/Sensory |
| HBXGE12 | B44958 | WO200055200-A1 | Cancer |
| HCDAA24 | B44960 | WO200055200-A1 | Cancer |
| HCDAH02 | B44962 | WO200055200-A1 | Immune/Hematopoietic, |
| | | | Musculoskeletal |
| HCDAR40 | B44964 | WO200055200-A1 | Cardiovascular, |
| | | | Immune/Hematopoietic, |
| | | | Musculoskeletal |
| HCDBE76 | B44965 | WO200055200-A1 | Cancer |
| HCDBO32 | B44966 | WO200055200-A1 | Cancer |
| HTDAF68 | B45025 | WO200058357-A1 | Immune/Hematopoietic |
| HTWFA88 | B45027 | WO200058357-A1 | Digestive, |
| | | | Immune/Hematopoietic |
| HSDJV40 | B45028 | WO200058357-A1 | Immune/Hematopoietic, |
| | | | Neural/Sensory |
| HSDKA64 | B45029 | WO200058357-A1 | Immune/Hematopoietic, |
| | | | Neural/Sensory |
| HRAAC36 | B45030 | WO200058357-A1 | Excretory, |
| | | | Immune/Hematopoietic |
| HPRCF50 | B45031 | WO200058357-A1 | Cancer |
| HUSXP50 | B45034 | WO200058357-A1 | Cardiovascular, |
| | | | Reproductive |
| HSSFP88 | B45035 | WO200058357-A1 | Cancer |
| HOVBS68 | B45037 | WO200058357-A1 | Cancer |
| HOVCO53 | B45039 | WO200058357-A1 | Reproductive |
| HOVBI16 | B45040 | WO200058357-A1 | Cancer |
| HOSFR35 | B45041 | WO200058357-A1 | Cancer |
| HNTRB25 | B45042 | WO200058357-A1 | Cancer |
| HUFBP77 | B45043 | WO200058357-A1 | Cancer |
| HUFAP33 | B45044 | WO200058357-A1 | Cancer |
| HSDHD05 | B45045 | WO200058357-A1 | Neural/Sensory |
| HTWFM85 | B45046 | WO200058357-A1 | Cancer |
| HSDJC96 | B45048 | WO200058357-A1 | Cancer |
| HTXKH40 | B45050 | WO200058357-A1 | Cancer |
| HPQCI62 | B45051 | WO200058357-A1 | Cancer |
| HOFMJ65 | B45053 | WO200058357-A1 | Cancer |
| HMUAN45 | B45057 | WO200058357-A1 | Cancer |
| HAJAB88 | B45059 | WO200058357-A1 | Cancer |
| HPTTT62 | B45067 | WO200058357-A1 | Cancer |
| HSRDW57 | B45071 | WO200058357-A1 | Cancer |
| HSRDW57 | B45118 | WO200058357-A1 | Cancer |
| HJBCG74 | B45121 | WO200058467-A1 | Cancer |
| HCECO77 | B45124 | WO200058467-A1 | Cancer |
| HJABC58 | B45129 | WO200058467-A1 | Cancer |
| HJMBK59 | B45140 | WO200058467-A1 | Cancer |
| HJMBP01 | B45141 | WO200058467-A1 | Cancer |
| HJMBW62 | B45143 | WO200058467-A1 | Reproductive |
| HJPAQ19 | B45146 | WO200058467-A1 | Cancer |
| HJPBN96 | B45148 | WO200058467-A1 | Cancer |
| HJPBK28 | B45149 | WO200058467-A1 | Cancer |
| HKABN63 | B45152 | WO200058467-A1 | Cancer |
| HKAFF50 | B45159 | WO200058467-A1 | Cancer |
| HKMSB01 | B45166 | WO200058467-A1 | Cancer |
| HISEJ52 | B45171 | WO200058467-A1 | Cancer |
| HJBCG74 | B45174 | WO200058467-A1 | Cancer |
| HJBCG74 | B45175 | WO200058467-A1 | Cancer |
| HOFNY15 | B45227 | WO200063230-A2 | Reproductive |
| HNTAF42 | B45228 | WO200063230-A2 | Cancer |
| HPJAW78 | B45233 | WO200063230-A2 | Immune/Hematopoietic, |
| | | | Musculoskeletal, |
| | | | Reproductive |
| HPJBS16 | B45234 | WO200063230-A2 | Connective/Epithelial, |
| | | | Reproductive |
| HPJCV35 | B45236 | WO200063230-A2 | Reproductive |
| HSNAH56 | B45239 | WO200063230-A2 | Cancer |
| HE2FE89 | B45246 | WO200063230-A2 | Cardiovascular, |
| | | | Digestive, |
| | | | Mixed Fetal |
| HPVAF86 | B45249 | WO200063230-A2 | Reproductive |
| HOGCD78 | B45257 | WO200063230-A2 | Reproductive |
| HRABU56 | B45264 | WO200063230-A2 | Cardiovascular, |
| | | | Excretory, |
| | | | Musculoskeletal |
| HCUBY47 | B45267 | WO200063230-A2 | Digestive, |
| | | | Immune/Hematopoietic |
| HUDBE20 | B45270 | WO200063230-A2 | Reproductive |
| HUDBK47 | B45271 | WO200063230-A2 | Immune/Hematopoietic, |
| | | | Reproductive |
| HSOAH16 | B45318 | WO200061628-A1 | Digestive |
| HWTBX66 | B45320 | WO200061628-A1 | Cancer |
| HTXDO17 | B45321 | WO200061628-A1 | Immune/Hematopoietic, |
| | | | Neural/Sensory, |
| | | | Respiratory |
| HSSDQ20 | B45325 | WO200061628-A1 | Musculoskeletal, |
| | | | Neural/Sensory |
| HTOHM82 | B45329 | WO200061628-A1 | Cancer |
| HTOIH51 | B45333 | WO200061628-A1 | Immune/Hematopoietic |
| HHLBA86 | B45334 | WO200061628-A1 | Digestive |
| HTAEH58 | B45335 | WO200061628-A1 | Immune/Hematopoietic |
| HLTCO22 | B45338 | WO200061628-A1 | Cancer |
| HTOJS23 | B45343 | WO200061628-A1 | Immune/Hematopoietic |
| HNHBE21 | B45356 | WO200061628-A1 | Immune/Hematopoietic |
| HSSFE38 | B45387 | WO200061627-A1 | Cancer |
| HTOGB79 | B45388 | WO200061627-A1 | Cancer |
| HKABU43 | B45389 | WO200061627-A1 | Cancer |
| HSYBV44 | B45398 | WO200061627-A1 | Immune/Hematopoietic |
| HOHBZ10 | B45399 | WO200061627-A1 | Cancer |
| HWAAQ28 | B45400 | WO200061627-A1 | Cancer |
| HWBBQ70 | B45402 | WO200061627-A1 | Immune/Hematopoietic, |
| | | | Neural/Sensory |
| HWBCN36 | B45403 | WO200061627-A1 | Immune/Hematopoietic |
| HWBCP16 | B45404 | WO200061627-A1 | Immune/Hematopoietic |
| HWHGW09 | B45406 | WO200061627-A1 | Cancer |
| HWHHA21 | B45407 | WO200061627-A1 | Connective/Epithelial |
| HYABE50 | B45408 | WO200061627-A1 | Cancer |
| HBXFA04 | B45411 | WO200061627-A1 | Neural/Sensory |
| HPRCA64 | B45412 | WO200061627-A1 | Cancer |
| HTXAA20 | B45414 | WO200061627-A1 | Cancer |
| HOFAA78 | B45423 | WO200061627-A1 | Reproductive |
| HTOGR38 | B45427 | WO200061627-A1 | Immune/Hematopoietic |
| HUKBT67 | B45431 | WO200061627-A1 | Cancer |
| HCEMU42 | B45432 | WO200061627-A1 | Cancer |
| HWHPB78 | B45433 | WO200061627-A1 | Cancer |
| HSYBV44 | B45452 | WO200061627-A1 | Immune/Hematopoietic |
| HNHEN70 | B45699 | WO200071584-A1 | Cancer |
| HLYBN81 | B45700 | WO200071584-A1 | Cancer |
| H7TME50 | B45701 | WO200071584-A1 | Cancer |
| HDPWP65 | B45702 | WO200071584-A1 | Cancer |
| HDTIE58 | B45703 | WO200071584-A1 | Cardiovascular, |
| | | | Connective/Epithelial, |
| | | | Immune/Hematopoietic |
| H7TPC96 | B45704 | WO200071584-A1 | Cancer |
| H7MAD52 | B45705 | WO200071584-A1 | Reproductive |
| HYASC03 | B49502 | WO200070076-A1 | Endocrine, |
| | | | Immune/Hematopoietic |
| HCE1K90 | B49503 | WO200070076-A1 | Cancer |
| HNTMH2C | B49504 | WO200070076-A1 | Cancer |
| HE8EJ16 | B49505 | WO200070076-A1 | Mixed Fetal, |
| | | | Neural/Sensory, |
| | | | Reproductive |
| HFEBD57 | B49506 | WO200070076-A1 | Cancer |
| HOFAD65 | B49507 | WO200070076-A1 | Cancer |
| HAPRB43 | B49508 | WO200070076-A1 | Cancer |
| HCE1K90 | B49509 | WO200070076-A1 | Cancer |
| HE8EJ16 | B49510 | WO200070076-A1 | Mixed Fetal, |
| | | | Neural/Sensory, |
| | | | Reproductive |
| HFEBD57 | B49511 | WO200070076-A1 | Cancer |
| HFEBD57 | B49512 | WO200070076-A1 | Cancer |
| HOFAD65 | B49513 | WO200070076-A1 | Cancer |
| HFPEY75 | B49533 | WO200061774-A2 | Cancer |
| HOHEC84 | B49534 | WO200061774-A2 | Immune/Hematopoietic, |
| | | | Musculoskeletal |
| HFKCD20 | B49535 | WO200061774-A2 | Cancer |
| HKMLR17 | B49536 | WO200061774-A2 | Cancer |
| HTHCW70 | B49537 | WO200061774-A2 | Cancer |
| HOHEC84 | B49538 | WO200061774-A2 | Immune/Hematopoietic, |
| | | | Musculoskeletal |
| HOUCQ17 | B50011 | WO200071577-A1 | Cancer |
| HMADD44 | B50378 | WO200061614-A2 | Cancer |
| HDQER52 | B50379 | WO200061614-A2 | Cancer |
| HTELM46 | B50380 | WO200061614-A2 | Digestive, |
| | | | Immune/Hematopoietic, |
| | | | Reproductive |
| HDPUS73 | B50381 | WO200061614-A2 | Cancer |
| HFCDT50 | B50382 | WO200061614-A2 | Cancer |
| HEMGR64 | B50383 | WO200061614-A2 | Cancer |
| HHFDM26 | B50384 | WO200061614-A2 | Cancer |
| HTTIA36 | B50385 | WO200061614-A2 | Cancer |
| HDQHP22 | B50387 | WO200061614-A2 | Cancer |
| HRDCD90 | B50388 | WO200061614-A2 | Cancer |
| HEOMG91 | B50389 | WO200061614-A2 | Cancer |
| HSLGK66 | B50390 | WO200061614-A2 | Cancer |
| HSIFX64 | B50391 | WO200061614-A2 | Cancer |
| HETCD80 | B50392 | WO200061614-A2 | Reproductive |
| HHSGB09 | B50393 | WO200061614-A2 | Cancer |
| HLWBT44 | B50394 | WO200061614-A2 | Cancer |
| HTLJG95 | B50395 | WO200061614-A2 | Cancer |
| HDPDH32 | B50935 | WO200073323-A2 | Immune/Hematopoietic |
| HHFMQ22 | B50936 | WO200073323-A2 | Cancer |
| HETCM67 | B50937 | WO200073323-A2 | Cancer |
| HWBDU78 | B50938 | WO200073323-A2 | Cancer |
| HTXEM16 | B50939 | WO200073323-A2 | Cancer |
| HBJEM23 | B50940 | WO200073323-A2 | Cardiovascular, |
| | | | Musculoskeletal, |
| | | | Reproductive |
| H7TMD22 | B50941 | WO200073323-A2 | Neural/Sensory |
| HDPDH32 | B50942 | WO200073323-A2 | Immune/Hematopoietic |
| HDPDH32 | B50943 | WO200073323-A2 | Immune/Hematopoietic |
| HSQAX94 | B51382 | WO200058495-A1 | Cancer |
| HTOFA11 | B51383 | WO200058495-A1 | Cancer |
| HFFAH01 | B51384 | WO200058495-A1 | Digestive, |
| | | | Immune/Hematopoietic, |
| | | | Neural/Sensory |
| HNHBI65 | B51385 | WO200058495-A1 | Immune/Hematopoietic |
| HNHCP14 | B51386 | WO200058495-A1 | Immune/Hematopoietic |
| HEAAW54 | B51387 | WO200058495-A1 | Reproductive |
| HSRDM56 | B51393 | WO200058495-A1 | Cancer |
| HSAXL82 | B51397 | WO200058495-A1 | Immune/Hematopoietic |
| HCE3L04 | B51398 | WO200058495-A1 | Neural/Sensory |
| HEBGM06 | B51402 | WO200058495-A1 | Cancer |
| HTWBO30 | B51403 | WO200058495-A1 | Cancer |
| HSSJF26 | B51404 | WO200058495-A1 | Musculoskeletal |
| HUKAD46 | B51412 | WO200058495-A1 | Endocrine, |
| | | | Immune/Hematopoietic, |
| | | | Reproductive |
| HPDDT14 | B51413 | WO200058495-A1 | Cancer |
| HTEDF78 | B51415 | WO200058495-A1 | Reproductive |
| HSUSB73 | B51416 | WO200058495-A1 | Immune/Hematopoietic, |
| | | | Reproductive |
| HSRAA81 | B51417 | WO200058495-A1 | Cancer |
| HCABW10 | B51420 | WO200058495-A1 | Cancer |
| HTWAM19 | B51422 | WO200058495-A1 | Immune/Hematopoietic |
| HSDZO08 | B51620 | WO200061620-A1 | Cancer |
| HSLHX15 | B51624 | WO200061620-A1 | Musculoskeletal |
| HSNBM34 | B51625 | WO200061620-A1 | Digestive |
| HSWBE76 | B51629 | WO200061620-A1 | Cancer |
| HSXAS59 | B51630 | WO200061620-A1 | Neural/Sensory |
| HSXAY60 | B51631 | WO200061620-A1 | Cancer |
| HTEDX07 | B51635 | WO200061620-A1 | Cancer |
| HTEJY20 | B51640 | WO200061620-A1 | Cancer |
| HLDQU79 | B51645 | WO200061620-A1 | Cancer |
| HTLBT80 | B51646 | WO200061620-A1 | Cancer |
| HTEAF65 | B51648 | WO200061620-A1 | Excretory, |
| | | | Reproductive |
| HTNBJ15 | B51649 | WO200061620-A1 | Cancer |
| HOUEP77 | B51650 | WO200061620-A1 | Cancer |
| HTOJL95 | B51651 | WO200061620-A1 | Cancer |
| HTTDN24 | B51653 | WO200061620-A1 | Cancer |
| HTXAD75 | B51655 | WO200061620-A1 | Cancer |
| HTXDJ21 | B51657 | WO200061620-A1 | Immune/Hematopoietic |
| HKB1E57 | B51658 | WO200061620-A1 | Cancer |
| HAQBZ15 | B51659 | WO200061620-A1 | Cancer |
| HMWAB92 | B51661 | WO200061620-A1 | Cancer |
| HSNBL85 | B51663 | WO200061620-A1 | Cancer |
| HWBDJ08 | B51664 | WO200061620-A1 | Cancer |
| HYABC84 | B51667 | WO200061620-A1 | Cancer |
| HTEDX07 | B51682 | WO200061620-A1 | Cancer |
| HOUHQ36 | B51724 | WO200061625-A1 | Connective/Epithelial |
| HOUIG92 | B51726 | WO200061625-A1 | Cancer |
| HSAZP90 | B51728 | WO200061625-A1 | Immune/Hematopoietic |
| HSPAY90 | B51730 | WO200061625-A1 | Cancer |
| HWHPU44 | B51731 | WO200061625-A1 | Connective/Epithelial |
| HWACZ33 | B51734 | WO200061625-A1 | Digestive, |
| | | | Immune/Hematopoietic, |
| | | | Reproductive |
| HRADA42 | B51736 | WO200061625-A1 | Cancer |
| HRADN25 | B51737 | WO200061625-A1 | Cancer |
| HRADN25 | B51738 | WO200061625-A1 | Cancer |
| HRADT25 | B51739 | WO200061625-A1 | Digestive, |
| | | | Excretory |
| HRADT25 | B51740 | WO200061625-A1 | Digestive, |
| | | | Excretory |
| HOHEC84 | B51741 | WO200061625-A1 | Immune/Hematopoietic, |
| | | | Musculoskeletal |
| HRADU15 | B51742 | WO200061625-A1 | Excretory |
| HWDAG96 | B51743 | WO200061625-A1 | Cancer |
| HWDAJ01 | B51745 | WO200061625-A1 | Connective/Epithelial |
| HMBSF85 | B51749 | WO200061625-A1 | Cancer |
| HRGSE38 | B51752 | WO200061625-A1 | Cancer |
| HTLBF46 | B51755 | WO200061625-A1 | Cancer |
| HSRHB59 | B51761 | WO200061625-A1 | Cancer |
| HRDDQ39 | B51762 | WO200061625-A1 | Cancer |
| HJPCH08 | B51766 | WO200061625-A1 | Cancer |
| HOEBJ70 | B51767 | WO200061625-A1 | Cancer |
| HDQER52 | B51795 | WO200061625-A1 | Cancer |
| HTLBF63 | B51827 | WO200061626-A1 | Cancer |
| HTOAT56 | B51828 | WO200061626-A1 | Cancer |
| HSSMY35 | B51829 | WO200061626-A1 | Cancer |
| HBHAA81 | B51840 | WO200061626-A1 | Cancer |
| HOQBG21 | B51841 | WO200061626-A1 | Cancer |
| HTPCG10 | B51842 | WO200061626-A1 | Cancer |
| HSHAX04 | B51848 | WO200061626-A1 | Cancer |
| HPEAD23 | B51850 | WO200061626-A1 | Cancer |
| HODDN21 | B51857 | WO200061626-A1 | Reproductive |
| HOABH36 | B51859 | WO200061626-A1 | Cancer |
| HOACG07 | B51860 | WO200061626-A1 | Cancer |
| HPMDA80 | B51864 | WO200061626-A1 | Cancer |
| HSKCQ51 | B51865 | WO200061626-A1 | Cancer |
| HRDDS22 | B51870 | WO200061626-A1 | Cancer |
| HTXDT72 | B51871 | WO200061626-A1 | Cancer |
| HTXDG92 | B51873 | WO200061626-A1 | Cancer |
| HTXES13 | B51874 | WO200061626-A1 | Cancer |
| HSSEF77 | B51875 | WO200061626-A1 | Cancer |
| HTEGH03 | B51883 | WO200061626-A1 | Cancer |
| HLMJB64 | B51933 | WO200058334-A1 | Cancer |
| HLMNA19 | B51936 | WO200058334-A1 | Cardiovascular, |
| | | | Immune/Hematopoietic |
| HLQAM30 | B51937 | WO200058334-A1 | Cancer |
| HLQCX36 | B51942 | WO200058334-A1 | Digestive |
| HLQCY09 | B51943 | WO200058334-A1 | Digestive |
| HLQDM47 | B51947 | WO200058334-A1 | Digestive |
| HLQDU77 | B51948 | WO200058334-A1 | Cancer |
| HLTDA14 | B51952 | WO200058334-A1 | Immune/Hematopoietic |
| HLTDK30 | B51955 | WO200058334-A1 | Cancer |
| HLTDX04 | B51958 | WO200058334-A1 | Cancer |
| HLWAU42 | B51964 | WO200058334-A1 | Cancer |
| HLWAW73 | B51965 | WO200058334-A1 | Cancer |
| HLWAX50 | B51966 | WO200058334-A1 | Cancer |
| HLWBJ93 | B51968 | WO200058334-A1 | Cancer |
| HLWCN37 | B51970 | WO200058334-A1 | Cancer |
| HLYAL28 | B51975 | WO200058334-A1 | Immune/Hematopoietic |
| HFXDR47 | B52012 | WO200061596-A1 | Cancer |
| HNHHB10 | B52017 | WO200061596-A1 | Immune/Hematopoietic, |
| | | | Reproductive |
| HPTRI42 | B52019 | WO200061596-A1 | Cancer |
| HTWCE14 | B52020 | WO200061596-A1 | Cancer |
| HPTVH59 | B52025 | WO200061596-A1 | Endocrine, |
| | | | Neural/Sensory |
| HUSGU40 | B52027 | WO200061596-A1 | Cancer |
| HUSYG26 | B52028 | WO200061596-A1 | Cancer |
| HOVCJ71 | B52029 | WO200061596-A1 | Reproductive |
| HSKYR49 | B52034 | WO200061596-A1 | Cancer |
| HTWEG06 | B52040 | WO200061596-A1 | Immune/Hematopoietic |
| HSDJF04 | B52041 | WO200061596-A1 | Cancer |
| HPQAN50 | B52044 | WO200061596-A1 | Reproductive |
| HT5FX76 | B52051 | WO200061596-A1 | Cancer |
| HT5FX79 | B52052 | WO200061596-A1 | Cancer |
| HNTRQ40 | B52053 | WO200061596-A1 | Cancer |
| HOUFS04 | B52057 | WO200061596-A1 | Cancer |
| HOGAR71 | B52059 | WO200061596-A1 | Cancer |
| HOFNB74 | B52060 | WO200061596-A1 | Reproductive |
| HOGAR71 | B52101 | WO200061596-A1 | Cancer |
| H7TDB54 | B52104 | WO200061624-A1 | Cancer |
| HOSEM81 | B52105 | WO200061624-A1 | Cancer |
| HTXKF95 | B52108 | WO200061624-A1 | Cancer |
| HTGGM44 | B52113 | WO200061624-A1 | Immune/Hematopoietic, |
| | | | Musculoskeletal |
| HROBJ10 | B52114 | WO200061624-A1 | Cancer |
| HTXLC05 | B52118 | WO200061624-A1 | Digestive, |
| | | | Immune/Hematopoietic, |
| | | | Respiratory |
| HTXLC45 | B52119 | WO200061624-A1 | Immune/Hematopoietic |
| HNHLD80 | B52120 | WO200061624-A1 | Immune/Hematopoietic |
| HNGKT41 | B52124 | WO200061624-A1 | Immune/Hematopoietic |
| HNHMP15 | B52125 | WO200061624-A1 | Immune/Hematopoietic |
| HNHMY76 | B52127 | WO200061624-A1 | Immune/Hematopoietic, |
| | | | Reproductive |
| HNHND14 | B52129 | WO200061624-A1 | Immune/Hematopoietic |
| HNHOF09 | B52131 | WO200061624-A1 | Immune/Hematopoietic |
| HODEM38 | B52132 | WO200061624-A1 | Digestive, |
| | | | Immune/Hematopoietic, |
| | | | Reproductive |
| HNGMW45 | B52137 | WO200061624-A1 | Immune/Hematopoietic |
| HNGNK44 | B52139 | WO200061624-A1 | Immune/Hematopoietic |
| HTLGL33 | B52145 | WO200061624-A1 | Reproductive |
| HTLGY50 | B52146 | WO200061624-A1 | Cancer |
| HNGKY94 | B52147 | WO200061624-A1 | Immune/Hematopoietic |
| HTXNV66 | B52150 | WO200061624-A1 | Cancer |
| HRODG74 | B53274 | WO200055351-A1 | Cancer |
| HTTDO45 | B53323 | WO200055351-A1 | Cancer |
| HSIFY77 | B53335 | WO200055351-A1 | Cancer |
| HWMIW26 | B53358 | WO200055351-A1 | Cancer |
| HEAHA84 | B53397 | WO200055351-A1 | Cancer |
| HBKDN33 | B53414 | WO200055351-A1 | Cancer |
| HKAIL83 | B53430 | WO200055351-A1 | Cancer |
| HBMSK08 | B53503 | WO200055351-A1 | Cancer |
| HTELE03 | B53617 | WO200055351-A1 | Cancer |
| HSWAR63 | B53774 | WO200055351-A1 | Reproductive |
| HFXAM85 | B54142 | WO200055320-A1 | Cancer |
| HISCO10 | B54185 | WO200055320-A1 | Digestive |
| HISBT02 | B54226 | WO200055320-A1 | Digestive |
| HNHLV34 | B54251 | WO200055320-A1 | Cancer |
| HUSXO71 | B54257 | WO200055320-A1 | Cardiovascular, |
| | | | Immune/Hematopoietic, |
| | | | Reproductive |
| HLWBY67 | B54277 | WO200055320-A1 | Cancer |
| HUVDP63 | B54282 | WO200055320-A1 | Cancer |
| HSTAH26 | B54290 | WO200055320-A1 | Connective/Epithelial |
| HWLXE16 | B54305 | WO200055320-A1 | Digestive |
| HDQEG93 | B54316 | WO200055320-A1 | Cancer |
| HSLJG12 | B54341 | WO200055320-A1 | Cancer |
| HAOSL81 | B54358 | WO200055320-A1 | Cancer |
| HOFNH33 | B54374 | WO200055320-A1 | Reproductive |
| HAJBV26 | B56077 | WO200070042-A1 | Cancer |
| HAPOC74 | B56078 | WO200070042-A1 | Excretory, |
| | | | Immune/Hematopoietic, |
| | | | Reproductive |
| HATEI47 | B56079 | WO200070042-A1 | Endocrine |
| HNHGD15 | B56080 | WO200070042-A1 | Immune/Hematopoietic |
| HRKAB52 | B56081 | WO200070042-A1 | Cancer |
| HKGAT94 | B56082 | WO200070042-A1 | Digestive, |
| | | | Reproductive |
| HODAH46 | B56083 | WO200070042-A1 | Cancer |
| HASCE69 | B56084 | WO200070042-A1 | Cancer |
| HBNBE21 | B56085 | WO200070042-A1 | Cancer |
| HFLSH80 | B56086 | WO200070042-A1 | Cancer |
| HRACM44 | B56087 | WO200070042-A1 | Excretory, |
| | | | Immune/Hematopoietic |
| HBXFR04 | B56090 | WO200070042-A1 | Neural/Sensory |
| HNHFM14 | B56094 | WO200070042-A1 | Cancer |
| HEBCM27 | B56095 | WO200070042-A1 | Cancer |
| HNHBM80 | B56096 | WO200070042-A1 | Immune/Hematopoietic, |
| | | | Reproductive |
| HTEAR66 | B56098 | WO200070042-A1 | Reproductive |
| HTLDW38 | B56099 | WO200070042-A1 | Immune/Hematopoietic, |
| | | | Neural/Sensory, |
| | | | Reproductive |
| HTOFD28 | B56100 | WO200070042-A1 | Immune/Hematopoietic |
| HFPBW41 | B56101 | WO200070042-A1 | Neural/Sensory |
| HTSAC80 | B56102 | WO200070042-A1 | Cancer |
| HANGD45 | B56103 | WO200070042-A1 | Musculoskeletal |
| HNGJL11 | B56106 | WO200070042-A1 | Immune/Hematopoietic, |
| | | | Musculoskeletal |
| HYBBE75 | B56108 | WO200070042-A1 | Musculoskeletal |
| HCWDS72 | B56109 | WO200070042-A1 | Cancer |
| HKPAD17 | B56110 | WO200070042-A1 | Excretory |
| HTLGY87 | B56114 | WO200070042-A1 | Cancer |
| HULAG01 | B56115 | WO200070042-A1 | Cardiovascular |
| HYAAJ71 | B56116 | WO200070042-A1 | Immune/Hematopoietic |
| HE9HY07 | B56118 | WO200070042-A1 | Mixed Fetal, |
| | | | Reproductive |
| HLSAF81 | B56121 | WO200070042-A1 | Cancer |
| HNGAU09 | B56123 | WO200070042-A1 | Immune/Hematopoietic |
| HTEID16 | B56124 | WO200070042-A1 | Reproductive |
| HTWKE60 | B56125 | WO200070042-A1 | Immune/Hematopoietic |
| HHLAB61 | B56127 | WO200070042-A1 | Digestive |
| HRLMB56 | B56128 | WO200070042-A1 | Cancer |
| HCUDW10 | B56131 | WO200070042-A1 | Cancer |
| HNGIQ46 | B56133 | WO200070042-A1 | Immune/Hematopoietic |
| H7TMD22 | B56135 | WO200070042-A1 | Neural/Sensory |
| HHFCJ31 | B56136 | WO200070042-A1 | Cardiovascular, |
| | | | Connective/Epithelial, |
| | | | Reproductive |
| HLDBW08 | B56137 | WO200070042-A1 | Digestive |
| H6EEW15 | B56139 | WO200070042-A1 | Cancer |
| HNHBM26 | B56142 | WO200070042-A1 | Immune/Hematopoietic, |
| | | | Reproductive |
| HFIVA74 | B56144 | WO200070042-A1 | Musculoskeletal, |
| | | | Reproductive |
| HPWAG46 | B56145 | WO200070042-A1 | Cancer |
| HBJFM34 | B56146 | WO200070042-A1 | Immune/Hematopoietic |
| HRDDS01 | B56147 | WO200070042-A1 | Musculoskeletal |
| HGBDH53 | B56152 | WO200070042-A1 | Cancer |
| HMKCV28 | B56154 | WO200070042-A1 | Neural/Sensory |
| HPLAT69 | B56155 | WO200070042-A1 | Cancer |
| HNGBJ27 | B56157 | WO200070042-A1 | Immune/Hematopoietic |
| HFXHO83 | B56158 | WO200070042-A1 | Cancer |
| HKGAM07 | B56159 | WO200070042-A1 | Digestive, |
| | | | Endocrine |
| HTXFE73 | B56160 | WO200070042-A1 | Cancer |
| HEBBN36 | B56163 | WO200070042-A1 | Cancer |
| HJPCY06 | B56164 | WO200070042-A1 | Cancer |
| HTEGS19 | B56165 | WO200070042-A1 | Cancer |
| HMJAK63 | B56166 | WO200070042-A1 | Neural/Sensory |
| HNHGE75 | B56170 | WO200070042-A1 | Immune/Hematopoietic |
| HMELA16 | B56171 | WO200070042-A1 | Cardiovascular, |
| | | | Immune/Hematopoietic |
| HNGAJ15 | B56172 | WO200070042-A1 | Immune/Hematopoietic, |
| | | | Neural/Sensory |
| HNHHD40 | B56173 | WO200070042-A1 | Cancer |
| HFPAA06 | B56177 | WO200070042-A1 | Cancer |
| HNGIH43 | B56180 | WO200070042-A1 | Immune/Hematopoietic, |
| | | | Reproductive |
| HLSAD65 | B56182 | WO200070042-A1 | Cancer |
| HMDAK33 | B56183 | WO200070042-A1 | Neural/Sensory |
| HNALC70 | B56184 | WO200070042-A1 | Cancer |
| HOUCW42 | B56185 | WO200070042-A1 | Connective/Epithelial |
| HLMMX46 | B56186 | WO200070042-A1 | Immune/Hematopoietic |
| HHSDI68 | B56188 | WO200070042-A1 | Neural/Sensory |
| HLMIV11 | B56190 | WO200070042-A1 | Immune/Hematopoietic |
| HBMCI50 | B56193 | WO200070042-A1 | Immune/Hematopoietic |
| HCRAI47 | B56195 | WO200070042-A1 | Cancer |
| HNHEU34 | B56198 | WO200070042-A1 | Immune/Hematopoietic |
| HPFCR15 | B56199 | WO200070042-A1 | Digestive, |
| | | | Mixed Fetal, |
| | | | Reproductive |
| HNGJM27 | B56201 | WO200070042-A1 | Immune/Hematopoietic |
| HNHEL19 | B56202 | WO200070042-A1 | Immune/Hematopoietic, |
| | | | Reproductive |
| HGOCD38 | B56204 | WO200070042-A1 | Cancer |
| HHGCG53 | B56205 | WO200070042-A1 | Cancer |
| HHSBJ93 | B56206 | WO200070042-A1 | Digestive, |
| | | | Immune/Hematopoietic, |
| | | | Neural/Sensory |
| HLHDS79 | B56208 | WO200070042-A1 | Cancer |
| HNHEA64 | B56209 | WO200070042-A1 | Immune/Hematopoietic |
| HOVAZ13 | B56211 | WO200070042-A1 | Cancer |
| HHGBK24 | B56214 | WO200070042-A1 | Cancer |
| HILCG67 | B56215 | WO200070042-A1 | Cancer |
| HOSFC36 | B56218 | WO200070042-A1 | Cancer |
| HKGAT94 | B56220 | WO200070042-A1 | Digestive, |
| | | | Reproductive |
| HBNBE21 | B56221 | WO200070042-A1 | Cancer |
| HFLSH80 | B56222 | WO200070042-A1 | Cancer |
| HGBDH53 | B56227 | WO200070042-A1 | Cancer |
| HMELA16 | B56230 | WO200070042-A1 | Cardiovascular, |
| | | | Immune/Hematopoietic |
| HNGAJ15 | B56231 | WO200070042-A1 | Immune/Hematopoietic, |
| | | | Neural/Sensory |
| HCRAI47 | B56232 | WO200070042-A1 | Cancer |
| HNHEL19 | B56233 | WO200070042-A1 | Immune/Hematopoietic, |
| | | | Reproductive |
| HOSFC36 | B56236 | WO200070042-A1 | Cancer |
| HHSBJ93 | B56351 | WO200070042-A1 | Digestive, |
| | | | Immune/Hematopoietic, |
| | | | Neural/Sensory |
| HJAAT54 | B56364 | WO200055174-A1 | Cancer |
| HPCQS73 | B56431 | WO200055174-A1 | Cancer |
| HPRTL26 | B56435 | WO200055174-A1 | Reproductive |
| HPFEA08 | B56518 | WO200055174-A1 | Reproductive |
| HTEPF49 | B56536 | WO200055174-A1 | Cancer |
| HOFAC67 | B56601 | WO200055174-A1 | Reproductive |
| HNTBH70 | B56606 | WO200055174-A1 | Cancer |
| HMQAI69 | B56630 | WO200055174-A1 | Cancer |
| HDPBI36 | B56671 | WO200055174-A1 | Cancer |
| HL2AH06 | B56687 | WO200055174-A1 | Immune/Hematopoietic |
| HHEPI21 | B56725 | WO200055174-A1 | Cancer |
| HAIBC14 | B56739 | WO200055174-A1 | Cancer |
| HDQGM08 | B56749 | WO200055174-A1 | Cancer |
| HWHPD31 | B56788 | WO200055174-A1 | Cancer |
| HPJCY94 | B56791 | WO200055174-A1 | Musculoskeletal, |
| | | | Reproductive |
| HDSAK19 | B56816 | WO200055174-A1 | Cancer |
| HTTFG83 | B56820 | WO200055174-A1 | Reproductive |
| HDPVR90 | B56824 | WO200055174-A1 | Cancer |
| HSLJW05 | B56860 | WO200055174-A1 | Cancer |
| HHEPE84 | B56876 | WO200055174-A1 | Cancer |
| HE2LW65 | B56909 | WO200055174-A1 | Cancer |
| HPRTI79 | B56925 | WO200055174-A1 | Cancer |
| HEQAN39 | B56926 | WO200055174-A1 | Cancer |
| HEMFC70 | B56931 | WO200055174-A1 | Cancer |
| HELGM94 | B56937 | WO200055174-A1 | Cancer |
| HDHMB78 | B56950 | WO200055174-A1 | Cancer |
| HDPQE64 | B56987 | WO200055174-A1 | Cancer |
| HDPBQ32 | B56996 | WO200055174-A1 | Cancer |
| HBXGB85 | B57056 | WO200055174-A1 | Neural/Sensory |
| HBUAC02 | B57061 | WO200055174-A1 | Cancer |
| HOCOT88 | B57077 | WO200055174-A1 | Cancer |
| HAJAT72 | B57101 | WO200055174-A1 | Reproductive |
| HPJAV43 | B57106 | WO200055174-A1 | Immune/Hematopoietic, |
| | | | Reproductive, |
| | | | Respiratory |
| HRODJ79 | B57121 | WO200055174-A1 | Cancer |
| HE8FD92 | B57128 | WO200055174-A1 | Cancer |
| HETAM53 | B57137 | WO200055174-A1 | Cancer |
| HCHBQ27 | B57159 | WO200055174-A1 | Reproductive |
| HAPSG03 | B58194 | WO200055180-A2 | Cancer |
| HHFFR04 | B58240 | WO200055180-A2 | Cancer |
| HCLSC85 | B58320 | WO200055180-A2 | Respiratory |
| HPAMC60 | B58368 | WO200055180-A2 | Cancer |
| HCE5E24 | B58386 | WO200055180-A2 | Cancer |
| HMADJ17 | B58396 | WO200055180-A2 | Cancer |
| HADCL25 | B58403 | WO200055180-A2 | Cancer |
| HWDAO40 | B58434 | WO200055180-A2 | Cancer |
| HRGBG45 | B58718 | WO200055173-A1 | Cancer |
| HOFMM27 | B58772 | WO200055173-A1 | Reproductive |
| HOFMH95 | B58829 | WO200055173-A1 | Reproductive |
| HEMFK40 | B58912 | WO200055173-A1 | Cancer |
| HODBC01 | B58913 | WO200055173-A1 | Reproductive |
| HOGAV29 | B58914 | WO200055173-A1 | Immune/Hematopoietic, |
| | | | Reproductive |
| HOFNL25 | B58917 | WO200055173-A1 | Reproductive |
| HOFMH12 | B58929 | WO200055173-A1 | Reproductive |
| HOFOC33 | B58932 | WO200055173-A1 | Reproductive |
| HSIFL06 | B58996 | WO200055173-A1 | Cancer |
| HNHBE38 | B59469 | WO200077173-A1 | Cancer |
| HOPBP13 | B59470 | WO200077173-A1 | Cancer |
| HOUDE92 | B59472 | WO200077173-A1 | Cancer |
| HPQAJ27 | B59473 | WO200077173-A1 | Cancer |
| HTLEV48 | B59476 | WO200077173-A1 | Reproductive |
| HSPAI20 | B59478 | WO200077173-A1 | Digestive, |
| | | | Neural/Sensory |
| HSPAA89 | B59479 | WO200077173-A1 | Digestive |
| HTWEH94 | B59482 | WO200077173-A1 | Immune/Hematopoietic |
| HTEGS48 | B59490 | WO200077173-A1 | Reproductive |
| HTEIV65 | B59491 | WO200077173-A1 | Reproductive |
| HOSEI81 | B59494 | WO200077173-A1 | Digestive, |
| | | | Musculoskeletal |
| HOEFL74 | B59495 | WO200077173-A1 | Cardiovascular, |
| | | | Digestive, |
| | | | Musculoskeletal |
| HOGAA41 | B59497 | WO200077173-A1 | Cancer |
| HOFMT59 | B59499 | WO200077173-A1 | Reproductive |
| HSYBD33 | B59502 | WO200077173-A1 | Immune/Hematopoietic |
| HTOHO21 | B59503 | WO200077173-A1 | Immune/Hematopoietic |
| HTAED89 | B59504 | WO200077173-A1 | Immune/Hematopoietic |
| HUSCA09 | B60703 | WO200076531-A1 | Cancer |
| HBXCD59 | B60705 | WO200076531-A1 | Immune/Hematopoietic, |
| | | | Neural/Sensory |
| HDPSZ07 | B60706 | WO200076531-A1 | Immune/Hematopoietic |
| HCLCU75 | B60712 | WO200076531-A1 | Respiratory |
| HDABR74 | B60714 | WO200076531-A1 | Cancer |
| HSSEA64 | B60721 | WO200076531-A1 | Cancer |
| HSSJF96 | B60722 | WO200076531-A1 | Musculoskeletal |
| HT4FV41 | B60724 | WO200076531-A1 | Cancer |
| HBSAJ63 | B60725 | WO200076531-A1 | Cancer |
| HTODA92 | B60726 | WO200076531-A1 | Cancer |
| HTTCB60 | B60727 | WO200076531-A1 | Cancer |
| HTTEO25 | B60728 | WO200076531-A1 | Cancer |
| HTXDD61 | B60733 | WO200076531-A1 | Cancer |
| HTXJM94 | B60734 | WO200076531-A1 | Cancer |
| HWHRC51 | B60736 | WO200076531-A1 | Cancer |
| HAGFJ67 | B60737 | WO200076531-A1 | Digestive, |
| | | | Immune/Hematopoietic, |
| | | | Neural/Sensory |
| HBSAK32 | B60739 | WO200076531-A1 | Cancer |
| HCHCG33 | B60741 | WO200076531-A1 | Cancer |
| HE8FD92 | B60747 | WO200076531-A1 | Cancer |
| HSAWB58 | B63049 | WO200061748-A1 | Immune/Hematopoietic |
| HCE1T53 | B63050 | WO200061748-A1 | Neural/Sensory |
| HODCY44 | B63057 | WO200061748-A1 | Reproductive |
| HTEJF31 | B63072 | WO200061748-A1 | Reproductive |
| HTPCW21 | B63077 | WO200061748-A1 | Digestive, |
| | | | Neural/Sensory |
| HPFBA54 | B63082 | WO200061748-A1 | Reproductive |
| HSABG81 | B63083 | WO200061748-A1 | Cancer |
| HTECB02 | B63084 | WO200061748-A1 | Cancer |
| HTEDJ28 | B63086 | WO200061748-A1 | Cancer |
| HSLEC18 | B63092 | WO200061748-A1 | Cancer |
| HTSGO13 | B63095 | WO200061748-A1 | Cancer |
| HTLEM16 | B63096 | WO200061748-A1 | Cancer |
| HTXPD86 | B63136 | WO200061629-A1 | Cancer |
| HWLGP26 | B63137 | WO200061629-A1 | Cancer |
| HAJAY92 | B63141 | WO200061629-A1 | Cancer |
| HSYBZ94 | B63145 | WO200061629-A1 | Cancer |
| HPRBH85 | B63146 | WO200061629-A1 | Cancer |
| HTECE87 | B63147 | WO200061629-A1 | Cancer |
| HNHGD95 | B63148 | WO200061629-A1 | Cardiovascular, |
| | | | Immune/Hematopoietic |
| HNKAA76 | B63150 | WO200061629-A1 | Cancer |
| HOABP31 | B63152 | WO200061629-A1 | Cancer |
| HOHBC57 | B63154 | WO200061629-A1 | Cancer |
| HOSCZ41 | B63156 | WO200061629-A1 | Cancer |
| HMVEC89 | B63157 | WO200061629-A1 | Cancer |
| HPJBJ51 | B63162 | WO200061629-A1 | Cancer |
| HGBBR29 | B63164 | WO200061629-A1 | Cancer |
| HPMDD27 | B63165 | WO200061629-A1 | Cancer |
| HPRCM72 | B63169 | WO200061629-A1 | Cancer |
| HPTRM02 | B63171 | WO200061629-A1 | Cancer |
| HPTRW28 | B63172 | WO200061629-A1 | Cancer |
| HRAAZ12 | B63175 | WO200061629-A1 | Cancer |
| HRDEX93 | B63177 | WO200061629-A1 | Cancer |
| HRDFE30 | B63178 | WO200061629-A1 | Cancer |
| HBJHT01 | B63180 | WO200061629-A1 | Immune/Hematopoietic, |
| | | | Reproductive |
| HE8FC45 | B64422 | WO200077255-A1 | Cancer |
| HETCI16 | B64423 | WO200077255-A1 | Cancer |
| HFCBL53 | B64427 | WO200077255-A1 | Cancer |
| HE6GR29 | B64429 | WO200077255-A1 | Cancer |
| HBJEA15 | B64432 | WO200077255-A1 | Cancer |
| HAPNJ33 | B64434 | WO200077255-A1 | Cancer |
| HTXKB57 | B64435 | WO200077255-A1 | Cancer |
| HDLAL94 | B64438 | WO200077255-A1 | Cancer |
| HFVHX08 | B64440 | WO200077255-A1 | Cancer |
| HMVCS92 | B64441 | WO200077255-A1 | Cancer |
| HNEDQ02 | B64443 | WO200077255-A1 | Cancer |
| HPWTF53 | B64450 | WO200077255-A1 | Cancer |
| HRTAP63 | B64451 | WO200077255-A1 | Cancer |
| HASAU26 | B64453 | WO200077255-A1 | Cancer |
| HPWTF23 | B64456 | WO200077255-A1 | Cancer |
| HSLHG78 | B64457 | WO200077255-A1 | Cancer |
| HTNBJ15 | B64461 | WO200077255-A1 | Cancer |
| HTXJW06 | B64463 | WO200077255-A1 | Cancer |
| HUKFV37 | B64466 | WO200077255-A1 | Cancer |
| HWBBU75 | B64468 | WO200077255-A1 | Cancer |
| HWBEF34 | B64469 | WO200077255-A1 | Immune/Hematopoietic, |
| | | | Neural/Sensory |
| HDLAL94 | B64492 | WO200077255-A1 | Cancer |
| HUKFV37 | B64539 | WO200077255-A1 | Cancer |
| HUKFV37 | B64540 | WO200077255-A1 | Cancer |
| HMSGU30 | B64549 | WO200077197-A1 | Cancer |
| HMSHU20 | B64550 | WO200077197-A1 | Immune/Hematopoietic, |
| | | | Reproductive |
| HMTAB77 | B64551 | WO200077197-A1 | Cancer |
| HMUBX48 | B64552 | WO200077197-A1 | Musculoskeletal, |
| | | | Reproductive |
| HMWCG28 | B64553 | WO200077197-A1 | Cancer |
| HMWFO89 | B64555 | WO200077197-A1 | Cancer |
| HMWGM41 | B64556 | WO200077197-A1 | Cancer |
| HMWGV85 | B64557 | WO200077197-A1 | Cancer |
| HNDAC35 | B64558 | WO200077197-A1 | Cancer |
| HNGDN07 | B64559 | WO200077197-A1 | Immune/Hematopoietic, |
| | | | Reproductive |
| HOFMF63 | B64564 | WO200077197-A1 | Cancer |
| HOSEO83 | B64567 | WO200077197-A1 | Cancer |
| HPIAL55 | B64568 | WO200077197-A1 | Cancer |
| HRAAF59 | B64569 | WO200077197-A1 | Excretory |
| HSDIK31 | B64571 | WO200077197-A1 | Cancer |
| HSDJG47 | B64573 | WO200077197-A1 | Cancer |
| HSOAT44 | B64574 | WO200077197-A1 | Cancer |
| HTAEF02 | B64578 | WO200077197-A1 | Immune/Hematopoietic |
| HTLCX82 | B64579 | WO200077197-A1 | Cancer |
| HADDP51 | B64581 | WO200077197-A1 | Cancer |
| HAOAG15 | B64584 | WO200077197-A1 | Cancer |
| HATCS79 | B64585 | WO200077197-A1 | Endocrine, |
| | | | Immune/Hematopoietic |
| HMWGM41 | B64604 | WO200077197-A1 | Cancer |
| HOFMF63 | B64612 | WO200077197-A1 | Cancer |
| HEMBP72 | B64627 | WO200077197-A1 | Cancer |
| HEMBP72 | B64628 | WO200077197-A1 | Cancer |
| HAOAG15 | B64657 | WO200077197-A1 | Cancer |
| HAOAG15 | B64658 | WO200077197-A1 | Cancer |
| HKGDO12 | B64667 | WO200077237-A1 | Cancer |
| HLQAD72 | B64668 | WO200077237-A1 | Cancer |
| HFXHM93 | B64672 | WO200077237-A1 | Neural/Sensory |
| HEBCW57 | B64675 | WO200077237-A1 | Mixed Fetal, |
| | | | Neural/Sensory |
| HAECD28 | B64676 | WO200077237-A1 | Cancer |
| HADXA10 | B64677 | WO200077237-A1 | Cancer |
| HELEL76 | B64678 | WO200077237-A1 | Cancer |
| HETBJ88 | B64680 | WO200077237-A1 | Cancer |
| HETCM67 | B64681 | WO200077237-A1 | Cancer |
| HFCBL53 | B64682 | WO200077237-A1 | Cancer |
| HFEBK75 | B64683 | WO200077237-A1 | Connective/Epithelial |
| HFIIZ61 | B64684 | WO200077237-A1 | Cancer |
| HGBDL51 | B64688 | WO200077237-A1 | Cancer |
| HGLDA95 | B64689 | WO200077237-A1 | Cancer |
| HGLDB06 | B64690 | WO200077237-A1 | Cancer |
| HHBEI14 | B64691 | WO200077237-A1 | Cancer |
| HLDBG17 | B64697 | WO200077237-A1 | Cancer |
| HMCIH27 | B64701 | WO200077237-A1 | Cancer |
| HMEKW71 | B64702 | WO200077237-A1 | Cancer |
| HNGEA90 | B64705 | WO200077237-A1 | Immune/Hematopoietic |
| HNHEN70 | B64708 | WO200077237-A1 | Cancer |
| HOAAH51 | B64711 | WO200077237-A1 | Cancer |
| HORBL77 | B64712 | WO200077237-A1 | Cancer |
| HODAH46 | B64713 | WO200077237-A1 | Cancer |
| HMWEM23 | B64718 | WO200077237-A1 | Cancer |
| HNEBX72 | B64775 | WO200077256-A1 | Immune/Hematopoietic, |
| | | | Neural/Sensory |
| H6EEA48 | B64776 | WO200077256-A1 | Cancer |
| HACBS22 | B64778 | WO200077256-A1 | Cancer |
| HADDP23 | B64779 | WO200077256-A1 | Cancer |
| HAGFD75 | B64782 | WO200077256-A1 | Cancer |
| HAGFS57 | B64783 | WO200077256-A1 | Cancer |
| HAHSD51 | B64785 | WO200077256-A1 | Cancer |
| HANKC93 | B64787 | WO200077256-A1 | Musculoskeletal |
| HAPSH37 | B64789 | WO200077256-A1 | Cancer |
| HATAL05 | B64790 | WO200077256-A1 | Cancer |
| HCBAB34 | B64799 | WO200077256-A1 | Cancer |
| HCE5H86 | B64802 | WO200077256-A1 | Cancer |
| HCEBF54 | B64803 | WO200077256-A1 | Cancer |
| HCEDN07 | B64804 | WO200077256-A1 | Digestive, |
| | | | Mixed Fetal, |
| | | | Neural/Sensory |
| HCEGH74 | B64805 | WO200077256-A1 | Cancer |
| HCELB04 | B64806 | WO200077256-A1 | Cancer |
| HDHEA33 | B64813 | WO200077256-A1 | Cancer |
| HDPIF65 | B64814 | WO200077256-A1 | Immune/Hematopoietic |
| HDPMC52 | B64816 | WO200077256-A1 | Digestive, |
| | | | Immune/Hematopoietic, |
| | | | Musculoskeletal |
| HDSAO14 | B64819 | WO200077256-A1 | Cancer |
| HDTAR39 | B64820 | WO200077256-A1 | Cancer |
| HBXFW01 | B64844 | WO200077256-A1 | Neural/Sensory |
| HLYEJ14 | B64883 | WO200076530-A1 | Cancer |
| HPJCX13 | B64888 | WO200076530-A1 | Cancer |
| HFKEV77 | B64889 | WO200076530-A1 | Cancer |
| HCEOV48 | B64890 | WO200076530-A1 | Cancer |
| HCRMR35 | B64891 | WO200076530-A1 | Cancer |
| HDPNJ26 | B64893 | WO200076530-A1 | Cancer |
| HDQGD06 | B64894 | WO200076530-A1 | Cancer |
| HDQHM36 | B64895 | WO200076530-A1 | Immune/Hematopoietic |
| HFCBL53 | B64901 | WO200076530-A1 | Cancer |
| HIBCO70 | B64905 | WO200076530-A1 | Cancer |
| HLDCR26 | B64908 | WO200076530-A1 | Cancer |
| HLDDM27 | B64909 | WO200076530-A1 | Cancer |
| HMABK52 | B64910 | WO200076530-A1 | Immune/Hematopoietic |
| HNGBC53 | B64915 | WO200076530-A1 | Immune/Hematopoietic |
| HNGJB41 | B64916 | WO200076530-A1 | Immune/Hematopoietic |
| HNHLS76 | B64917 | WO200076530-A1 | Immune/Hematopoietic |
| HSJAQ10 | B64925 | WO200076530-A1 | Cancer |
| HSLDW54 | B64927 | WO200076530-A1 | Cancer |
| HSLFR59 | B64928 | WO200076530-A1 | Cancer |
| HSNAN38 | B64930 | WO200076530-A1 | Cancer |
| HLYEJ14 | B64931 | WO200076530-A1 | Cancer |
| HLYEJ14 | B64932 | WO200076530-A1 | Cancer |
| HPMCV08 | B64993 | WO200075375-A1 | Cancer |
| HFKEM67 | B64994 | WO200075375-A1 | Excretory, |
| | | | Neural/Sensory, |
| | | | Reproductive |
| HDTBW53 | B64996 | WO200075375-A1 | Cancer |
| HFICL62 | B64997 | WO200075375-A1 | Cancer |
| HKAIA52 | B64998 | WO200075375-A1 | Cancer |
| HEGAK44 | B64999 | WO200075375-A1 | Cancer |
| HFXHC85 | B65000 | WO200075375-A1 | Cancer |
| HSXCV85 | B65001 | WO200075375-A1 | Neural/Sensory, |
| | | | Reproductive |
| HPMCU14 | B65002 | WO200075375-A1 | Cancer |
| HYACJ27 | B65003 | WO200075375-A1 | Immune/Hematopoietic |
| HAQBZ15 | B65004 | WO200075375-A1 | Cancer |
| HBIBX03 | B65005 | WO200075375-A1 | Cancer |
| HBMVI06 | B65006 | WO200075375-A1 | Cancer |
| HDPBA28 | B65007 | WO200075375-A1 | Cancer |
| HDPUH26 | B65008 | WO200075375-A1 | Cancer |
| HJTAD07 | B65009 | WO200075375-A1 | Cancer |
| HDPPJ60 | B65010 | WO200075375-A1 | Cancer |
| HLTAU74 | B65011 | WO200075375-A1 | Cancer |
| HCFNN16 | B65012 | WO200075375-A1 | Cancer |
| HCWUI05 | B65013 | WO200075375-A1 | Immune/Hematopoietic |
| HCEBC76 | B65014 | WO200075375-A1 | Neural/Sensory |
| HTEGT82 | B65015 | WO200075375-A1 | Digestive, |
| | | | Reproductive |
| HLHTP35 | B65016 | WO200075375-A1 | Cancer |
| HSYAZ63 | B65017 | WO200075375-A1 | Cancer |
| HLTCR13 | B65018 | WO200075375-A1 | Cancer |
| HPMCV08 | B65019 | WO200075375-A1 | Cancer |
| HEGAK44 | B65021 | WO200075375-A1 | Cancer |
| HEGAK44 | B65022 | WO200075375-A1 | Cancer |
| HSXCV85 | B65024 | WO200075375-A1 | Neural/Sensory, |
| | | | Reproductive |
| HAQBZ15 | B65025 | WO200075375-A1 | Cancer |
| HDPMM34 | R76127 | WO9517092-A | Cancer |
| HAPBR31 | R76128 | WO9517092-A | Cancer |
| HPTXE69 | R76818 | WO9520398-A | Cancer |
| HPTGA39 | R76820 | WO9520398-A | Cancer |
| HFTDJ13 | R81567 | WO9606169-A1 | Cancer |
| HPAAA47 | R88481 | WO9601270-A1 | Cancer |
| HDQAC88 | R93087 | WO9605856-A1 | Cancer |
| HCHBM70 | W06550 | WO9639419-A1 | Cancer |
| HAPBR31 | W07203 | WO9634891-A1 | Cancer |
| HDPMM34 | W07204 | WO9634891-A1 | Cancer |
| HDTAX72 | W07606 | WO9639522-A1 | Cancer |
| HPBCW46 | W09405 | WO9639158-A1 | Mixed Fetal, |
| | | | Neural/Sensory |
| HE9ME29 | W09408 | WO9639486-A1 | Cancer |
| HDTAX72 | W10574 | WO9624668-A1 | Cancer |
| HGCOP28 | W12692 | WO9639424-A1 | Cancer |
| HDQAC88 | W22670 | WO9731098-A1 | Cancer |
| HDPJJ70 | W22732 | WO9724929-A1 | Cancer |
| HSKHZ53 | W23663 | WO9729189-A1 | Cancer |
| HATCY89 | W27087 | WO9725349-A1 | Cancer |
| HNTCF82 | W27224 | WO9735870-A1 | Cardiovascular, |
| | | | Connective/Epithelial, |
| | | | Reproductive |
| HFEBJ25 | W29291 | WO9735010-A1 | Cancer |
| HKMMP34 | W29292 | WO9735010-A1 | Cancer |
| HBMBJ94 | W31527 | WO9737022-A1 | Digestive, |
| | | | Immune/Hematopoietic |
| HDPVA94 | W31902 | WO9737021-A1 | Cancer |
| HFIZF58 | W32110 | WO9738012-A1 | Cancer |
| HSLDE91 | W32112 | WO9734998-A1 | Cancer |
| HDPVA94 | W32323 | WO9736915-A1 | Cancer |
| HETFO52 | W35803 | WO9734997-A1 | Neural/Sensory, |
| | | | Reproductive |
| HETEZ10 | W35804 | WO9734997-A1 | Cancer |
| HBMTO47 | W35904 | WO9738003-A1 | Cancer |
| HDQDX59 | W37002 | WO9733902-A1 | Cancer |
| H2LAJ93 | W37844 | WO9807749-A1 | Cancer |
| HMWIP18 | W37845 | WO9807749-A1 | Cancer |
| HMQDN51 | W37935 | WO9808870-A1 | Cancer |
| HOECW07 | W37946 | WO9821236-A1 | Cancer |
| HTHBJ48 | W41938 | WO9748807-A1 | Digestive, |
| | | | Immune/Hematopoietic |
| HCHBM70 | W46882 | US5733748-A | Cancer |
| HAHSD23 | W48334 | WO9807881-A1 | Cancer |
| HTEHH47 | W48335 | WO9807754-A1 | Cancer |
| HPASD50 | W48391 | WO9807735-A1 | Cancer |
| HDQMC88 | W52842 | WO9807862-A2 | Connective/Epithelial, |
| | | | Immune/Hematopoietic |
| HKACN58 | W53897 | WO9808969-A1 | Cancer |
| HOEAL47 | W57635 | WO9812344-A1 | Cancer |
| HAPBR31 | W57697 | WO9814582-A1 | Cancer |
| HDPMM34 | W57698 | WO9814582-A1 | Cancer |
| HE9ME29 | W58704 | US5780263-A | Cancer |
| HDTAX72 | W58901 | WO9814477-A1 | Cancer |
| HISCH47 | W61621 | WO9831799-A2 | Cancer |
| HDPIR89 | W61622 | WO9831799-A2 | Digestive, |
| | | | Immune/Hematopoietic |
| HAIDQ59 | W61623 | WO9831799-A2 | Cancer |
| HHFEK40 | W61624 | WO9831799-A2 | Cancer |
| HGBGV89 | W61625 | WO9831799-A2 | Digestive |
| HUVBB80 | W61626 | WO9831799-A2 | Cancer |
| HFGAG96 | W61629 | WO9831799-A2 | Cancer |
| HDTEA84 | W63622 | WO9830694-A2 | Cancer |
| HPRCB54 | W64668 | WO9830693-A2 | Cancer |
| HAGFY16 | W67808 | WO9842738-A1 | Cancer |
| HASAV70 | W67811 | WO9842738-A1 | Cancer |
| HBNAF22 | W67812 | WO9842738-A1 | Cancer |
| HCDDR90 | W67814 | WO9842738-A1 | Cancer |
| HCEEF50 | W67815 | WO9842738-A1 | Cardiovascular, |
| | | | Neural/Sensory |
| HCEMU42 | W67816 | WO9842738-A1 | Cancer |
| HCENE16 | W67817 | WO9842738-A1 | Cancer |
| HMSJJ74 | W67818 | WO9842738-A1 | Cancer |
| HCUBF15 | W67819 | WO9842738-A1 | Immune/Hematopoietic |
| HE2DE47 | W67820 | WO9842738-A1 | Cancer |
| HKMLH01 | W67821 | WO9842738-A1 | Cancer |
| HE9DG49 | W67822 | WO9842738-A1 | Cancer |
| HELBA06 | W67823 | WO9842738-A1 | Cancer |
| HSLFM29 | W67824 | WO9842738-A1 | Cancer |
| HELBW38 | W67825 | WO9842738-A1 | Cancer |
| HFEAF41 | W67828 | WO9842738-A1 | Connective/Epithelial, |
| | | | Digestive |
| HFTBE43 | W67831 | WO9842738-A1 | Cancer |
| HLHSV96 | W67835 | WO9842738-A1 | Respiratory |
| HLTBX31 | W67837 | WO9842738-A1 | Cancer |
| HLTCJ63 | W67838 | WO9842738-A1 | Immune/Hematopoietic, |
| | | | Neural/Sensory, |
| | | | Reproductive |
| HMQAJ64 | W67840 | WO9842738-A1 | Connective/Epithelial, |
| | | | Immune/Hematopoietic, |
| | | | Reproductive |
| HOABG65 | W67841 | WO9842738-A1 | Musculoskeletal |
| HODCL36 | W67842 | WO9842738-A1 | Cancer |
| HODCL50 | W67843 | WO9842738-A1 | Reproductive |
| HODCZ16 | W67845 | WO9842738-A1 | Cancer |
| HTOEU03 | W67846 | WO9842738-A1 | Cancer |
| HPBCJ74 | W67847 | WO9842738-A1 | Cancer |
| HSIDQ18 | W67850 | WO9842738-A1 | Cancer |
| HSJBQ79 | W67852 | WO9842738-A1 | Cancer |
| HTEJN13 | W67854 | WO9842738-A1 | Neural/Sensory, |
| | | | Reproductive |
| HTHBL86 | W67855 | WO9842738-A1 | Immune/Hematopoietic |
| HTSFO71 | W67856 | WO9842738-A1 | Cancer |
| HAPNO80 | W67857 | WO9842738-A1 | Cancer |
| HBIBZ09 | W67858 | WO9842738-A1 | Cancer |
| HCFLD84 | W67859 | WO9842738-A1 | Cancer |
| HE8EZ48 | W67861 | WO9842738-A1 | Cancer |
| HEBGF73 | W67862 | WO9842738-A1 | Cancer |
| HFEBF41 | W67863 | WO9842738-A1 | Cancer |
| HFRBU14 | W67864 | WO9842738-A1 | Neural/Sensory |
| HHGCO88 | W67867 | WO9842738-A1 | Cancer |
| HHGDB72 | W67869 | WO9842738-A1 | Cancer |
| HHGDI71 | W67870 | WO9842738-A1 | Excretory |
| HHSDI45 | W67871 | WO9842738-A1 | Cancer |
| HHSEB66 | W67872 | WO9842738-A1 | Cancer |
| HAUAI83 | W67873 | WO9842738-A1 | Reproductive |
| HKDBL30 | W67874 | WO9842738-A1 | Cancer |
| HLDBQ19 | W67875 | WO9842738-A1 | Cancer |
| HMSGT42 | W67876 | WO9842738-A1 | Cancer |
| HMWIC78 | W67877 | WO9842738-A1 | Cancer |
| HMWIR31 | W67878 | WO9842738-A1 | Cancer |
| HNTAC73 | W67880 | WO9842738-A1 | Cancer |
| HOSEI45 | W67881 | WO9842738-A1 | Cancer |
| HOSFD58 | W67882 | WO9842738-A1 | Cancer |
| HSAUM95 | W67883 | WO9842738-A1 | Cancer |
| HSAUR67 | W67884 | WO9842738-A1 | Immune/Hematopoietic |
| HSKDI81 | W67885 | WO9842738-A1 | Cancer |
| HOUFJ08 | W67886 | WO9842738-A1 | Cancer |
| HTLEX50 | W67887 | WO9842738-A1 | Cancer |
| HSKHL65 | W67888 | WO9842738-A1 | Cancer |
| HHFGA11 | W67889 | WO9842738-A1 | Cancer |
| HAQCF47 | W67890 | WO9842738-A1 | Cancer |
| HBXFG80 | W67891 | WO9842738-A1 | Cancer |
| HFLQB16 | W67895 | WO9842738-A1 | Cancer |
| HBMCP89 | W67896 | WO9842738-A1 | Cancer |
| HE6DG34 | W67897 | WO9842738-A1 | Cancer |
| HE9DG49 | W67898 | WO9842738-A1 | Cancer |
| HELBA06 | W67899 | WO9842738-A1 | Cancer |
| HMQAJ64 | W67900 | WO9842738-A1 | Connective/Epithelial, |
| | | | Immune/Hematopoietic, |
| | | | Reproductive |
| HODCL36 | W67901 | WO9842738-A1 | Cancer |
| HODCL36 | W67902 | WO9842738-A1 | Cancer |
| HCMSD80 | W67903 | WO9842738-A1 | Cancer |
| HPBCJ74 | W67904 | WO9842738-A1 | Cancer |
| HHGDU04 | W67905 | WO9842738-A1 | Cancer |
| HTEJN13 | W67907 | WO9842738-A1 | Neural/Sensory, |
| | | | Reproductive |
| HAUCC47 | W67909 | WO9842738-A1 | Cancer |
| HOSFD58 | W67913 | WO9842738-A1 | Cancer |
| HSKHL65 | W67916 | WO9842738-A1 | Cancer |
| HHFGA11 | W67917 | WO9842738-A1 | Cancer |
| HOEBX83 | W67918 | WO9842738-A1 | Cancer |
| HHFGA11 | W67919 | WO9842738-A1 | Cancer |
| HTSFO71 | W67967 | WO9842738-A1 | Cancer |
| HKFBC53 | W68002 | WO9842738-A1 | Cancer |
| HSPBS71 | W69221 | WO9828420-A1 | Connective/Epithelial, |
| | | | Digestive, |
| | | | Immune/Hematopoietic |
| HDPBT77 | W69232 | WO9831806-A2 | Digestive, |
| | | | Immune/Hematopoietic, |
| | | | Reproductive |
| HNFFL83 | W69233 | WO9831806-A2 | Digestive, |
| | | | Immune/Hematopoietic |
| HETHE81 | W71593 | WO9833912-A1 | Cancer |
| HSVBZ80 | W73397 | WO9854206-A1 | Cancer |
| HTAAU21 | W73398 | WO9854206-A1 | Cancer |
| HUSIR91 | W73400 | WO9854206-A1 | Cancer |
| HADMC21 | W73401 | WO9854206-A1 | Cancer |
| HAGFM45 | W73402 | WO9854206-A1 | Cancer |
| HAIBE65 | W73403 | WO9854206-A1 | Cancer |
| HAQBH57 | W73404 | WO9854206-A1 | Cancer |
| HATCX80 | W73405 | WO9854206-A1 | Cancer |
| HLDOT61 | W73408 | WO9854206-A1 | Cancer |
| HEMCM42 | W73409 | WO9854206-A1 | Cancer |
| HFCDW34 | W73411 | WO9854206-A1 | Cancer |
| HTTEU91 | W73412 | WO9854206-A1 | Cancer |
| HHGBF89 | W73413 | WO9854206-A1 | Mixed Fetal |
| HKMLN27 | W73415 | WO9854206-A1 | Cancer |
| HLYAZ61 | W73419 | WO9854206-A1 | Immune/Hematopoietic |
| HMQDT36 | W73420 | WO9854206-A1 | Cancer |
| HETFI51 | W73428 | WO9854206-A1 | Cancer |
| HUSIR91 | W73429 | WO9854206-A1 | Cancer |
| HHGBF89 | W73430 | WO9854206-A1 | Mixed Fetal |
| HPWBA10 | W73432 | WO9854206-A1 | Immune/Hematopoietic, |
| | | | Reproductive |
| HPMBQ91 | W74413 | EP892053-A2 | Reproductive |
| HBGBW52 | W74732 | WO9839448-A2 | Cancer |
| HCUFQ22 | W74734 | WO9839448-A2 | Immune/Hematopoietic |
| HLDOU93 | W74738 | WO9839448-A2 | Digestive, |
| | | | Musculoskeletal, |
| | | | Reproductive |
| HNGJJ68 | W74741 | WO9839448-A2 | Cancer |
| HCFAW04 | W74742 | WO9839448-A2 | Immune/Hematopoietic |
| HLMAV65 | W74743 | WO9839448-A2 | Cancer |
| HPMFD84 | W74744 | WO9839448-A2 | Cancer |
| HE6DB26 | W74745 | WO9839448-A2 | Cancer |
| HODBD33 | W74747 | WO9839448-A2 | Reproductive |
| HBJAE44 | W74750 | WO9839448-A2 | Immune/Hematopoietic |
| HCFME41 | W74751 | WO9839448-A2 | Cancer |
| HOGCO71 | W74752 | WO9839448-A2 | Cancer |
| HOSEX08 | W74753 | WO9839448-A2 | Cancer |
| HSKNJ72 | W74754 | WO9839448-A2 | Digestive, |
| | | | Musculoskeletal |
| HEBEB69 | W74755 | WO9839448-A2 | Neural/Sensory, |
| | | | Reproductive |
| HE6EH18 | W74756 | WO9839448-A2 | Mixed Fetal, |
| | | | Neural/Sensory |
| HSSDM73 | W74758 | WO9839448-A2 | Musculoskeletal, |
| | | | Neural/Sensory, |
| | | | Reproductive |
| HMKCU94 | W74761 | WO9839448-A2 | Cancer |
| HRDEW41 | W74762 | WO9839448-A2 | Cancer |
| HBGDA21 | W74764 | WO9839448-A2 | Cancer |
| HFGAK75 | W74765 | WO9839448-A2 | Cancer |
| HFSAU96 | W74766 | WO9839448-A2 | Cancer |
| HOVCL83 | W74767 | WO9839448-A2 | Cancer |
| HBICM48 | W74769 | WO9839448-A2 | Cancer |
| HLTCL35 | W74770 | WO9839448-A2 | Cancer |
| HRSAN45 | W74771 | WO9839448-A2 | Cancer |
| HSNBB14 | W74772 | WO9839448-A2 | Cancer |
| HMABL38 | W74773 | WO9839448-A2 | Cancer |
| HSKDK47 | W74774 | WO9839448-A2 | Cancer |
| HOSFH03 | W74775 | WO9839448-A2 | Cancer |
| HOGAV75 | W74776 | WO9839448-A2 | Cancer |
| HBXDO23 | W74777 | WO9839448-A2 | Cancer |
| HAGBI17 | W74778 | WO9839448-A2 | Cancer |
| HPRCA31 | W74780 | WO9839448-A2 | Cancer |
| HPRCE95 | W74781 | WO9839448-A2 | Cancer |
| HHTLC66 | W74782 | WO9839448-A2 | Cancer |
| HMADJ02 | W74783 | WO9839448-A2 | Cancer |
| HPRCU93 | W74784 | WO9839448-A2 | Cancer |
| HSAXS65 | W74785 | WO9839448-A2 | Cancer |
| HHFHN61 | W74787 | WO9839448-A2 | Cancer |
| HCWEF90 | W74788 | WO9839448-A2 | Cancer |
| HFRAU10 | W74790 | WO9839448-A2 | Neural/Sensory |
| HATDT67 | W74791 | WO9839448-A2 | Cancer |
| HOUBG93 | W74792 | WO9839448-A2 | Cancer |
| HMWEX24 | W74793 | WO9839448-A2 | Cancer |
| HTOCD52 | W74795 | WO9839448-A2 | Digestive, |
| | | | Immune/Hematopoietic, |
| | | | Reproductive |
| HTGCP16 | W74796 | WO9839448-A2 | Cancer |
| HKIXR69 | W74797 | WO9839448-A2 | Cancer |
| HE6CN34 | W74800 | WO9839448-A2 | Cancer |
| HSQEL25 | W74802 | WO9839448-A2 | Cancer |
| HEBEG68 | W74803 | WO9839448-A2 | Cancer |
| HBIAB39 | W74804 | WO9839448-A2 | Cancer |
| HOEAS24 | W74805 | WO9839448-A2 | Cancer |
| HETDD75 | W74806 | WO9839448-A2 | Cancer |
| HSKNE46 | W74807 | WO9839448-A2 | Cancer |
| HPMFL27 | W74808 | WO9839448-A2 | Cancer |
| HPRAX55 | W74810 | WO9839448-A2 | Cancer |
| HE2PL77 | W74812 | WO9839448-A2 | Cancer |
| HLHAU92 | W74813 | WO9839448-A2 | Cancer |
| HTPEG42 | W74814 | WO9839448-A2 | Cancer |
| HAUAV32 | W74816 | WO9839448-A2 | Cancer |
| HNEBI60 | W74817 | WO9839448-A2 | Cancer |
| HTSEL31 | W74819 | WO9839448-A2 | Cancer |
| HAUBL57 | W74820 | WO9839448-A2 | Cancer |
| HE6CT48 | W74822 | WO9839448-A2 | Digestive, |
| | | | Mixed Fetal |
| HMDAA61 | W74823 | WO9839448-A2 | Cancer |
| HAQBK61 | W74824 | WO9839448-A2 | Cancer |
| HAQBF73 | W74825 | WO9839448-A2 | Cancer |
| HAQBT94 | W74826 | WO9839448-A2 | Cancer |
| HLQAB52 | W74828 | WO9839448-A2 | Cancer |
| HE2BG03 | W74830 | WO9839448-A2 | Cancer |
| HCUBC79 | W74832 | WO9839448-A2 | Cancer |
| HSVAF07 | W74833 | WO9839448-A2 | Cancer |
| HT3AM65 | W74834 | WO9839448-A2 | Cancer |
| HE6DK18 | W74835 | WO9839448-A2 | Cancer |
| HEBEK93 | W74836 | WO9839448-A2 | Cancer |
| HJPCM10 | W74837 | WO9839448-A2 | Cancer |
| HSXBL78 | W74838 | WO9839448-A2 | Cancer |
| HOEAW81 | W74839 | WO9839448-A2 | Cancer |
| HEAAR60 | W74841 | WO9839448-A2 | Cancer |
| HOVBA03 | W74843 | WO9839448-A2 | Cancer |
| HGBGK76 | W74844 | WO9839448-A2 | Digestive, |
| | | | Neural/Sensory |
| HBMUW78 | W74845 | WO9839448-A2 | Cancer |
| HATCM76 | W74848 | WO9839448-A2 | Cancer |
| H6EBJ64 | W74849 | WO9839448-A2 | Cancer |
| HDDAD77 | W74850 | WO9839448-A2 | Cancer |
| HSPAG15 | W74853 | WO9839448-A2 | Cancer |
| HUSHH48 | W74855 | WO9839448-A2 | Cancer |
| HHSCV65 | W74857 | WO9839448-A2 | Cancer |
| HHSDQ41 | W74858 | WO9839448-A2 | Cancer |
| HEBFU93 | W74860 | WO9839448-A2 | Excretory, |
| | | | Neural/Sensory, |
| | | | Reproductive |
| HSGSC60 | W74861 | WO9839448-A2 | Cancer |
| HPMGD24 | W74862 | WO9839448-A2 | Cancer |
| HPTVC60 | W74863 | WO9839448-A2 | Cancer |
| HSKNE18 | W74864 | WO9839448-A2 | Cancer |
| HMWIF35 | W74865 | WO9839448-A2 | Cancer |
| HMWGI25 | W74866 | WO9839448-A2 | Cancer |
| HSKGF03 | W74867 | WO9839448-A2 | Cancer |
| HMSKE75 | W74868 | WO9839448-A2 | Cancer |
| HCMSH30 | W74869 | WO9839448-A2 | Cancer |
| HTWCB92 | W74870 | WO9839448-A2 | Cancer |
| HBMDM46 | W74871 | WO9839448-A2 | Cancer |
| HFXHL79 | W74873 | WO9839448-A2 | Cancer |
| HBJFJ73 | W74874 | WO9839448-A2 | Cancer |
| HSJAP03 | W74875 | WO9839448-A2 | Cancer |
| H6EAD09 | W74876 | WO9839448-A2 | Cancer |
| HTLEF62 | W74879 | WO9839448-A2 | Cancer |
| HTLAD94 | W74880 | WO9839448-A2 | Cancer |
| HTSFQ12 | W74881 | WO9839448-A2 | Cancer |
| HCE2K05 | W74882 | WO9839448-A2 | Cancer |
| HLTED27 | W74884 | WO9839448-A2 | Cancer |
| HMKBA64 | W74885 | WO9839448-A2 | Cancer |
| HNFCO49 | W74886 | WO9839448-A2 | Cancer |
| HCELB21 | W74887 | WO9839448-A2 | Cancer |
| HSAAS44 | W74889 | WO9839448-A2 | Cancer |
| HAFAL73 | W74890 | WO9839448-A2 | Cancer |
| HSAWF26 | W74891 | WO9839448-A2 | Digestive, |
| | | | Immune/Hematopoietic, |
| | | | Musculoskeletal |
| HMQDN51 | W74892 | WO9839448-A2 | Cancer |
| H2LAO11 | W74894 | WO9839448-A2 | Cancer |
| HPTTU11 | W74896 | WO9839448-A2 | Cancer |
| HTEDJ34 | W74898 | WO9839448-A2 | Cancer |
| HFTAR26 | W74900 | WO9839448-A2 | Cancer |
| H2MBF44 | W74901 | WO9839448-A2 | Cancer |
| HE8BI92 | W74902 | WO9839448-A2 | Cancer |
| HFTBR48 | W74903 | WO9839448-A2 | Cancer |
| HE9CM64 | W74904 | WO9839448-A2 | Cancer |
| HATAV51 | W74905 | WO9839448-A2 | Cancer |
| HCEEK08 | W74907 | WO9839448-A2 | Cancer |
| HAFAU18 | W74908 | WO9839448-A2 | Cancer |
| HETBY74 | W74909 | WO9839448-A2 | Cancer |
| HTOAF35 | W74910 | WO9839448-A2 | Cancer |
| HCRBX32 | W74911 | WO9839448-A2 | Cancer |
| HEBGB80 | W74912 | WO9839448-A2 | Cancer |
| HFAMH74 | W74913 | WO9839448-A2 | Cancer |
| HLMAV65 | W74920 | WO9839448-A2 | Cancer |
| HMAGF23 | W74922 | WO9839448-A2 | Cancer |
| HE6EH18 | W74929 | WO9839448-A2 | Mixed Fetal, |
| | | | Neural/Sensory |
| HMKCU94 | W74930 | WO9839448-A2 | Cancer |
| HBGDA21 | W74931 | WO9839448-A2 | Cancer |
| HFKFN58 | W74932 | WO9839448-A2 | Cancer |
| HSNBB14 | W74935 | WO9839448-A2 | Cancer |
| HOSFH03 | W74937 | WO9839448-A2 | Cancer |
| HAGBI17 | W74939 | WO9839448-A2 | Cancer |
| HPRCA31 | W74940 | WO9839448-A2 | Cancer |
| HPRCU93 | W74943 | WO9839448-A2 | Cancer |
| HPDDK44 | W74944 | WO9839448-A2 | Cancer |
| HCWEF90 | W74946 | WO9839448-A2 | Cancer |
| HFRAU10 | W74947 | WO9839448-A2 | Neural/Sensory |
| HBIAB39 | W74953 | WO9839448-A2 | Cancer |
| HBIAB39 | W74954 | WO9839448-A2 | Cancer |
| HOEAS24 | W74955 | WO9839448-A2 | Cancer |
| HOEAS24 | W74956 | WO9839448-A2 | Cancer |
| HPRAX55 | W74958 | WO9839448-A2 | Cancer |
| HTPEG42 | W74960 | WO9839448-A2 | Cancer |
| HAUAV32 | W74961 | WO9839448-A2 | Cancer |
| HNEBI60 | W74962 | WO9839448-A2 | Cancer |
| HAUBL57 | W74963 | WO9839448-A2 | Cancer |
| HAUBL57 | W74964 | WO9839448-A2 | Cancer |
| HE6CT48 | W74965 | WO9839448-A2 | Digestive, |
| | | | Mixed Fetal |
| HMDAA61 | W74966 | WO9839448-A2 | Cancer |
| HAQBK61 | W74967 | WO9839448-A2 | Cancer |
| HCUHB01 | W74968 | WO9839448-A2 | Cancer |
| HETHE07 | W74970 | WO9839448-A2 | Cancer |
| HETHE07 | W74971 | WO9839448-A2 | Cancer |
| HLQAB52 | W74972 | WO9839448-A2 | Cancer |
| HEONN58 | W74973 | WO9839448-A2 | Cancer |
| HIBEK16 | W74974 | WO9839448-A2 | Cancer |
| HE2BG03 | W74975 | WO9839448-A2 | Cancer |
| HCUBC79 | W74976 | WO9839448-A2 | Cancer |
| HSVAF07 | W74978 | WO9839448-A2 | Cancer |
| HSVAF07 | W74979 | WO9839448-A2 | Cancer |
| HT3AM65 | W74980 | WO9839448-A2 | Cancer |
| HT3AM65 | W74981 | WO9839448-A2 | Cancer |
| HJPCM10 | W74983 | WO9839448-A2 | Cancer |
| HJPCM10 | W74984 | WO9839448-A2 | Cancer |
| HOVBA03 | W74987 | WO9839448-A2 | Cancer |
| H6EBJ64 | W74990 | WO9839448-A2 | Cancer |
| HUSHH48 | W74991 | WO9839448-A2 | Cancer |
| HEBFU93 | W74992 | WO9839448-A2 | Excretory, |
| | | | Neural/Sensory, |
| | | | Reproductive |
| HPTVC60 | W74993 | WO9839448-A2 | Cancer |
| HMWIF35 | W74995 | WO9839448-A2 | Cancer |
| HSKGF03 | W74996 | WO9839448-A2 | Cancer |
| HBJFJ73 | W75000 | WO9839448-A2 | Cancer |
| HCFBC03 | W75001 | WO9839448-A2 | Cancer |
| HSJAP03 | W75002 | WO9839448-A2 | Cancer |
| HE6FL83 | W75005 | WO9839448-A2 | Cancer |
| HPTTU11 | W75013 | WO9839448-A2 | Cancer |
| H2MBF44 | W75015 | WO9839448-A2 | Cancer |
| HE9CM64 | W75018 | WO9839448-A2 | Cancer |
| HAFAU18 | W75021 | WO9839448-A2 | Cancer |
| HSHCC16 | W75050 | WO9839448-A2 | Cancer |
| HGCMD20 | W75057 | WO9839446-A2 | Cancer |
| HLDBG33 | W75058 | WO9839446-A2 | Cancer |
| HLHEJ14 | W75059 | WO9839446-A2 | Cancer |
| HKCSR70 | W75060 | WO9839446-A2 | Cancer |
| HBMCY91 | W75062 | WO9839446-A2 | Immune/Hematopoietic |
| HSSGE07 | W75063 | WO9839446-A2 | Cancer |
| HBMBX59 | W75064 | WO9839446-A2 | Immune/Hematopoietic, |
| | | | Reproductive |
| HNGIT22 | W75065 | WO9839446-A2 | Immune/Hematopoietic |
| HERAD57 | W75066 | WO9839446-A2 | Connective/Epithelial |
| HCENJ40 | W75067 | WO9839446-A2 | Cancer |
| HCSRA90 | W75068 | WO9839446-A2 | Cardiovascular, |
| | | | Musculoskeletal |
| HBJFC03 | W75069 | WO9839446-A2 | Immune/Hematopoietic |
| HTEBY26 | W75071 | WO9839446-A2 | Cancer |
| HMABH07 | W75072 | WO9839446-A2 | Cancer |
| HSKNY94 | W75073 | WO9839446-A2 | Cancer |
| HMCDA67 | W75074 | WO9839446-A2 | Immune/Hematopoietic |
| HOSFF45 | W75075 | WO9839446-A2 | Cancer |
| HMJAA51 | W75076 | WO9839446-A2 | Cancer |
| HTEBF05 | W75077 | WO9839446-A2 | Reproductive |
| HTEAL31 | W75078 | WO9839446-A2 | Cancer |
| HSKXE91 | W75080 | WO9839446-A2 | Cancer |
| HPWTB39 | W75081 | WO9839446-A2 | Mixed Fetal, |
| | | | Reproductive |
| HTLEV12 | W75082 | WO9839446-A2 | Reproductive |
| HSPAF93 | W75083 | WO9839446-A2 | Digestive |
| HHFGL62 | W75084 | WO9839446-A2 | Cardiovascular |
| HCE1U14 | W75085 | WO9839446-A2 | Cancer |
| HTHBA79 | W75087 | WO9839446-A2 | Cancer |
| HAGBB70 | W75088 | WO9839446-A2 | Cancer |
| HETDG84 | W75089 | WO9839446-A2 | Cancer |
| HTEGA81 | W75090 | WO9839446-A2 | Cancer |
| HTXAK60 | W75091 | WO9839446-A2 | Cancer |
| HMHBN40 | W75092 | WO9839446-A2 | Cancer |
| HFVGS85 | W75093 | WO9839446-A2 | Cancer |
| HERAH81 | W75094 | WO9839446-A2 | Cancer |
| HMSEU04 | W75095 | WO9839446-A2 | Cancer |
| HNEDJ57 | W75096 | WO9839446-A2 | Cancer |
| HNTME13 | W75097 | WO9839446-A2 | Cancer |
| HSXBI25 | W75098 | WO9839446-A2 | Cancer |
| HSXCK41 | W75099 | WO9839446-A2 | Cancer |
| HE8CJ26 | W75100 | WO9839446-A2 | Cancer |
| HTTDS54 | W75101 | WO9839446-A2 | Cancer |
| HHFCW44 | W75102 | WO9839446-A2 | Cancer |
| HMCBP63 | W75103 | WO9839446-A2 | Cancer |
| HEMGE83 | W75104 | WO9839446-A2 | Cancer |
| HHSDC22 | W75105 | WO9839446-A2 | Digestive, |
| | | | Neural/Sensory |
| HHSDZ57 | W75106 | WO9839446-A2 | Cancer |
| HCRBS80 | W75107 | WO9839446-A2 | Cancer |
| HMMAB12 | W75108 | WO9839446-A2 | Immune/Hematopoietic, |
| | | | Neural/Sensory |
| HSKDW02 | W75109 | WO9839446-A2 | Cancer |
| HWHHL34 | W75110 | WO9839446-A2 | Cancer |
| HODAZ50 | W75111 | WO9839446-A2 | Reproductive |
| HCEWC82 | W75112 | WO9839446-A2 | Cancer |
| HE6ES13 | W75113 | WO9839446-A2 | Cancer |
| HSSEP68 | W75114 | WO9839446-A2 | Cancer |
| HRDEV41 | W75115 | WO9839446-A2 | Cancer |
| HILCJ01 | W75116 | WO9839446-A2 | Cancer |
| HSATP28 | W75117 | WO9839446-A2 | Cancer |
| HBJEM49 | W75119 | WO9839446-A2 | Cancer |
| HSLDJ95 | W75120 | WO9839446-A2 | Cancer, Immune |
| HSREG44 | W75121 | WO9839446-A2 | Cancer |
| HTXCT40 | W75122 | WO9839446-A2 | Cancer |
| HRGDF73 | W75123 | WO9839446-A2 | Cancer |
| HKMND45 | W75124 | WO9839446-A2 | Cancer |
| HPEBD70 | W75125 | WO9839446-A2 | Cancer |
| HLMDX11 | W75126 | WO9839446-A2 | Cancer |
| HKCSR70 | W75128 | WO9839446-A2 | Cancer |
| HETBI87 | W75129 | WO9839446-A2 | Reproductive |
| HSSGE07 | W75130 | WO9839446-A2 | Cancer |
| HCENJ40 | W75132 | WO9839446-A2 | Cancer |
| HSNBL85 | W75135 | WO9839446-A2 | Cancer |
| HMAAD57 | W75137 | WO9839446-A2 | Cancer |
| HMAAD57 | W75138 | WO9839446-A2 | Cancer |
| HSKNY94 | W75139 | WO9839446-A2 | Cancer |
| HOSFF45 | W75140 | WO9839446-A2 | Cancer |
| HMJAA51 | W75141 | WO9839446-A2 | Cancer |
| HTEAL31 | W75142 | WO9839446-A2 | Cancer |
| HSPAF93 | W75145 | WO9839446-A2 | Digestive |
| HHFGL62 | W75146 | WO9839446-A2 | Cardiovascular |
| HTHBA79 | W75148 | WO9839446-A2 | Cancer |
| HTEGA81 | W75151 | WO9839446-A2 | Cancer |
| HTEGA81 | W75152 | WO9839446-A2 | Cancer |
| HMHBN40 | W75154 | WO9839446-A2 | Cancer |
| HLHDL62 | W75155 | WO9839446-A2 | Cancer |
| HSXBI25 | W75156 | WO9839446-A2 | Cancer |
| HSXCK41 | W75157 | WO9839446-A2 | Cancer |
| HTTDS54 | W75159 | WO9839446-A2 | Cancer |
| HHFCW44 | W75160 | WO9839446-A2 | Cancer |
| HHSDZ57 | W75161 | WO9839446-A2 | Cancer |
| HAICS58 | W75162 | WO9839446-A2 | Cancer |
| HAICS58 | W75163 | WO9839446-A2 | Cancer |
| HSKDW02 | W75165 | WO9839446-A2 | Cancer |
| HETGL41 | W75166 | WO9839446-A2 | Cancer |
| HODAZ50 | W75167 | WO9839446-A2 | Reproductive |
| HE6ES13 | W75168 | WO9839446-A2 | Cancer |
| HSSEP68 | W75169 | WO9839446-A2 | Cancer |
| HRDEV41 | W75171 | WO9839446-A2 | Cancer |
| HHFGL41 | W75172 | WO9839446-A2 | Cancer |
| HBJEM49 | W75173 | WO9839446-A2 | Cancer |
| HFTAK35 | W75174 | WO9839446-A2 | Cancer |
| HTXCT40 | W75175 | WO9839446-A2 | Cancer |
| HRDBF52 | W75176 | WO9839446-A2 | Cancer |
| HKMND45 | W75177 | WO9839446-A2 | Cancer |
| HDTBJ30 | W75178 | WO9839446-A2 | Cancer |
| HLMDX11 | W75179 | WO9839446-A2 | Cancer |
| HCEAB46 | W75196 | WO9840483-A2 | Cancer |
| HCEDH81 | W75197 | WO9840483-A2 | Cancer |
| HELDY41 | W75200 | WO9840483-A2 | Cancer |
| HETDM20 | W75201 | WO9840483-A2 | Cancer |
| HE2DX30 | W75202 | WO9840483-A2 | Cancer |
| HJBCD89 | W75204 | WO9840483-A2 | Cancer |
| HJTAA17 | W75205 | WO9840483-A2 | Cancer |
| HLTBS22 | W75206 | WO9840483-A2 | Cancer |
| HNFCV70 | W75208 | WO9840483-A2 | Cancer |
| HNFGF45 | W75210 | WO9840483-A2 | Cancer |
| HOVAB12 | W75211 | WO9840483-A2 | Cancer |
| HPMBQ91 | W75212 | WO9840483-A2 | Reproductive |
| HRSMC69 | W75214 | WO9840483-A2 | Cancer |
| HSQFP46 | W75216 | WO9840483-A2 | Cancer |
| HTEAE62 | W75218 | WO9840483-A2 | Cardiovascular, |
| | | | Reproductive |
| HTEBY11 | W75219 | WO9840483-A2 | Reproductive |
| HTEEB42 | W75220 | WO9840483-A2 | Cancer |
| HTPBY11 | W75221 | WO9840483-A2 | Cancer |
| HCEDH81 | W75224 | WO9840483-A2 | Cancer |
| HJBCD89 | W75226 | WO9840483-A2 | Cancer |
| HNFCV70 | W75227 | WO9840483-A2 | Cancer |
| HPMBQ91 | W75228 | WO9840483-A2 | Reproductive |
| HBMSH54 | W75231 | WO9840483-A2 | Cancer |
| HSDEG01 | W75232 | WO9840483-A2 | Cancer |
| HSQFP46 | W75233 | WO9840483-A2 | Cancer |
| HTEBY11 | W75234 | WO9840483-A2 | Reproductive |
| HYACC84 | W75245 | WO9840483-A2 | Cancer |
| HETAG43 | W76253 | WO9831818-A2 | Digestive, |
| | | | Reproductive |
| HOSBI96 | W78128 | WO9856804-A1 | Cancer |
| HPDDC77 | W78131 | WO9856804-A1 | Cancer |
| HPEBD85 | W78132 | WO9856804-A1 | Digestive, |
| | | | Reproductive |
| HPMGQ80 | W78135 | WO9856804-A1 | Cancer |
| HSDES04 | W78140 | WO9856804-A1 | Cancer |
| HSHBQ68 | W78141 | WO9856804-A1 | Cancer |
| HSKBO20 | W78142 | WO9856804-A1 | Cancer |
| HSKZE52 | W78145 | WO9856804-A1 | Cancer |
| HWTAZ75 | W78146 | WO9856804-A1 | Cancer |
| HSVAG05 | W78148 | WO9856804-A1 | Cancer |
| HSVBF78 | W78149 | WO9856804-A1 | Cancer |
| HSXBO51 | W78150 | WO9856804-A1 | Cancer |
| HT4AI54 | W78152 | WO9856804-A1 | Cancer |
| HTEHU93 | W78153 | WO9856804-A1 | Reproductive |
| HMSDG61 | W78154 | WO9856804-A1 | Cancer |
| HTLDQ11 | W78157 | WO9856804-A1 | Reproductive |
| HTOBX52 | W78158 | WO9856804-A1 | Cancer |
| HTTCN24 | W78159 | WO9856804-A1 | Cancer |
| HTXCS21 | W78160 | WO9856804-A1 | Cancer |
| HBMBB80 | W78164 | WO9856804-A1 | Digestive, |
| | | | Immune/Hematopoietic |
| HSXBP68 | W78166 | WO9856804-A1 | Cancer |
| HFFAT33 | W78167 | WO9856804-A1 | Cancer |
| HFGAG96 | W78168 | WO9856804-A1 | Cancer |
| HETFJ05 | W78169 | WO9856804-A1 | Cancer |
| HE8BX01 | W78170 | WO9856804-A1 | Cancer |
| HMSJU68 | W78171 | WO9856804-A1 | Cancer |
| HOSCZ41 | W78172 | WO9856804-A1 | Cancer |
| HSQEA85 | W78174 | WO9856804-A1 | Cancer |
| HSTAG52 | W78175 | WO9856804-A1 | Cancer |
| HBXGP76 | W78177 | WO9856804-A1 | Immune/Hematopoietic, |
| | | | Neural/Sensory |
| HE6GL64 | W78178 | WO9856804-A1 | Cardiovascular, |
| | | | Immune/Hematopoietic, |
| | | | Mixed Fetal |
| HESAL35 | W78179 | WO9856804-A1 | Connective/Epithelial, |
| | | | Mixed Fetal |
| HNHAL34 | W78183 | WO9856804-A1 | Cancer |
| HOSFF78 | W78184 | WO9856804-A1 | Cancer |
| HPMCC16 | W78188 | WO9856804-A1 | Cancer |
| HOUCQ17 | W78189 | WO9856804-A1 | Cancer |
| HTOFC34 | W78192 | WO9856804-A1 | Cancer |
| H2CBJ08 | W78193 | WO9856804-A1 | Cancer |
| HAGFT48 | W78194 | WO9856804-A1 | Cancer |
| HCE5M29 | W78195 | WO9856804-A1 | Cancer |
| HCFNN01 | W78197 | WO9856804-A1 | Digestive, |
| | | | Immune/Hematopoietic, |
| | | | Neural/Sensory |
| HE7TF86 | W78198 | WO9856804-A1 | Cancer |
| HHGAU81 | W78200 | WO9856804-A1 | Cancer |
| HPTRF90 | W78206 | WO9856804-A1 | Cancer |
| HSRDH01 | W78207 | WO9856804-A1 | Cancer |
| HSAWD74 | W78208 | WO9856804-A1 | Cancer |
| HTEJO12 | W78209 | WO9856804-A1 | Digestive, |
| | | | Reproductive |
| HTLAB43 | W78210 | WO9856804-A1 | Cancer |
| HTWCT03 | W78211 | WO9856804-A1 | Immune/Hematopoietic |
| HSDES04 | W78213 | WO9856804-A1 | Cancer |
| HT3BE24 | W78214 | WO9856804-A1 | Cancer |
| HTTCN24 | W78216 | WO9856804-A1 | Cancer |
| HCRAZ77 | W78221 | WO9856804-A1 | Cancer |
| HFGAG96 | W78222 | WO9856804-A1 | Cancer |
| HADTN61 | W78223 | WO9856804-A1 | Cancer |
| HLYBF81 | W78224 | WO9856804-A1 | Cancer |
| HSTBE27 | W78225 | WO9856804-A1 | Cancer |
| HMSDG61 | W78263 | WO9856804-A1 | Cancer |
| HTOBX52 | W78274 | WO9856804-A1 | Cancer |
| HFGAG96 | W78295 | WO9856804-A1 | Cancer |
| HCE5M29 | W78316 | WO9856804-A1 | Cancer |
| HLCAA05 | W78321 | WO9856804-A1 | Cancer |
| HTLEF68 | W78326 | WO9856804-A1 | Cancer |
| HSJAR34 | W79739 | WO9846746-A1 | Cancer |
| HOUCQ17 | W80285 | EP874050-A2 | Cancer |
| HCWHZ93 | W83931 | WO9845712-A2 | Immune/Hematopoietic, |
| | | | Neural/Sensory |
| HE2FV03 | W83933 | WO9845712-A2 | Cancer |
| HCDAG36 | W83934 | WO9845712-A2 | Cancer |
| HMQBU44 | W83935 | WO9845712-A2 | Cancer |
| HLHCM89 | W83938 | WO9845712-A2 | Cancer |
| HLHEF26 | W83939 | WO9845712-A2 | Cancer |
| HLHEO50 | W83940 | WO9845712-A2 | Cancer |
| HDSAE10 | W83941 | WO9845712-A2 | Cancer |
| HSKNK73 | W83942 | WO9845712-A2 | Cancer |
| HSSMS41 | W83943 | WO9845712-A2 | Cancer |
| HNGBV36 | W83944 | WO9845712-A2 | Cancer |
| HNGDE27 | W83945 | WO9845712-A2 | Immune/Hematopoietic |
| HPFDU90 | W83947 | WO9845712-A2 | Cancer |
| HRLMD77 | W83948 | WO9845712-A2 | Cancer |
| HRLMF92 | W83949 | WO9845712-A2 | Cancer |
| HLHDZ58 | W88535 | WO9854963-A2 | Respiratory |
| HLMMJ13 | W88536 | WO9854963-A2 | Immune/Hematopoietic, |
| | | | Musculoskeletal, |
| | | | Reproductive |
| HNFED65 | W88539 | WO9854963-A2 | Excretory, |
| | | | Immune/Hematopoietic |
| HNHDX07 | W88540 | WO9854963-A2 | Immune/Hematopoietic |
| HNHGC82 | W88541 | WO9854963-A2 | Immune/Hematopoietic |
| HNHGO09 | W88542 | WO9854963-A2 | Immune/Hematopoietic |
| HOUBE18 | W88543 | WO9854963-A2 | Cancer |
| HOUDL69 | W88544 | WO9854963-A2 | Cancer |
| HPMFI71 | W88545 | WO9854963-A2 | Cancer |
| HPTBB03 | W88548 | WO9854963-A2 | Cancer |
| HPTWA66 | W88549 | WO9854963-A2 | Cancer |
| HPTWC08 | W88550 | WO9854963-A2 | Cancer |
| HRGCZ46 | W88551 | WO9854963-A2 | Cancer |
| HSAVU34 | W88552 | WO9854963-A2 | Cancer |
| HSDFW61 | W88553 | WO9854963-A2 | Cancer |
| HSQEO84 | W88556 | WO9854963-A2 | Cancer |
| HSXAM05 | W88557 | WO9854963-A2 | Cancer |
| HSXAS67 | W88558 | WO9854963-A2 | Neural/Sensory |
| HTDAF28 | W88559 | WO9854963-A2 | Cancer |
| HTOAM21 | W88562 | WO9854963-A2 | Immune/Hematopoietic |
| HETCH46 | W88563 | WO9854963-A2 | Cancer |
| HJPCD40 | W88564 | WO9854963-A2 | Cancer |
| HTWBY48 | W88565 | WO9854963-A2 | Immune/Hematopoietic |
| HWTBF59 | W88568 | WO9854963-A2 | Cancer |
| HAGFB60 | W88570 | WO9854963-A2 | Neural/Sensory |
| HATEF60 | W88571 | WO9854963-A2 | Cancer |
| HCDAR68 | W88573 | WO9854963-A2 | Cancer |
| HMDAN54 | W88575 | WO9854963-A2 | Immune/Hematopoietic, |
| | | | Neural/Sensory |
| HCEEC15 | W88577 | WO9854963-A2 | Cancer |
| HCESF40 | W88578 | WO9854963-A2 | Immune/Hematopoietic, |
| | | | Neural/Sensory |
| HCFMV39 | W88579 | WO9854963-A2 | Cancer |
| HCNAP62 | W88581 | WO9854963-A2 | Cancer |
| HCUDC07 | W88583 | WO9854963-A2 | Immune/Hematopoietic |
| HCWBB42 | W88584 | WO9854963-A2 | Immune/Hematopoietic |
| HE9ND48 | W88592 | WO9854963-A2 | Mixed Fetal |
| HEBBW11 | W88593 | WO9854963-A2 | Cancer |
| HEMAE80 | W88595 | WO9854963-A2 | Cardiovascular, |
| | | | Musculoskeletal, |
| | | | Reproductive |
| HFEBA88 | W88596 | WO9854963-A2 | Cancer |
| HGBAJ93 | W88599 | WO9854963-A2 | Cancer |
| HGBBQ69 | W88600 | WO9854963-A2 | Cancer |
| HHFHJ59 | W88602 | WO9854963-A2 | Cancer |
| HHPFD63 | W88606 | WO9854963-A2 | Endocrine, |
| | | | Immune/Hematopoietic, |
| | | | Neural/Sensory |
| HHSEG23 | W88607 | WO9854963-A2 | Neural/Sensory |
| HKIXL73 | W88609 | WO9854963-A2 | Cancer |
| HKMNC43 | W88610 | WO9854963-A2 | Excretory |
| HMEJE31 | W88611 | WO9854963-A2 | Cardiovascular |
| HNFAE54 | W88613 | WO9854963-A2 | Cancer |
| HNFJH45 | W88614 | WO9854963-A2 | Immune/Hematopoietic |
| HNGBT31 | W88615 | WO9854963-A2 | Immune/Hematopoietic |
| HNGIN60 | W88616 | WO9854963-A2 | Immune/Hematopoietic, |
| | | | Neural/Sensory |
| HNHDW42 | W88618 | WO9854963-A2 | Immune/Hematopoietic |
| HNHFL57 | W88619 | WO9854963-A2 | Immune/Hematopoietic |
| HOGAR52 | W88620 | WO9854963-A2 | Cancer |
| HOSBZ55 | W88621 | WO9854963-A2 | Cancer |
| HOSDI92 | W88622 | WO9854963-A2 | Cancer |
| HPBCU51 | W88623 | WO9854963-A2 | Cancer |
| HNTSU23 | W88628 | WO9854963-A2 | Cancer |
| HRDFB85 | W88629 | WO9854963-A2 | Cancer |
| HSKGN81 | W88631 | WO9854963-A2 | Cancer |
| HSPAH56 | W88632 | WO9854963-A2 | Cancer |
| HDTAL71 | W88633 | WO9854963-A2 | Cancer |
| HSXCS62 | W88634 | WO9854963-A2 | Cancer |
| HTEKM35 | W88636 | WO9854963-A2 | Neural/Sensory, |
| | | | Reproductive |
| HTGEP89 | W88637 | WO9854963-A2 | Immune/Hematopoietic, |
| | | | Neural/Sensory |
| HTPCN79 | W88640 | WO9854963-A2 | Digestive, |
| | | | Neural/Sensory |
| HTSGM54 | W88641 | WO9854963-A2 | Cancer |
| HTWAF58 | W88643 | WO9854963-A2 | Immune/Hematopoietic |
| HTWBY29 | W88644 | WO9854963-A2 | Cancer |
| HUKFC71 | W88645 | WO9854963-A2 | Cancer |
| HCE2V74 | W88646 | WO9854963-A2 | Cancer |
| HFXBW82 | W88652 | WO9854963-A2 | Neural/Sensory |
| HIBED17 | W88654 | WO9854963-A2 | Cancer |
| HPMCJ92 | W88657 | WO9854963-A2 | Musculoskeletal, |
| | | | Reproductive |
| HPWAZ95 | W88658 | WO9854963-A2 | Reproductive |
| HSUBW09 | W88660 | WO9854963-A2 | Digestive, |
| | | | Immune/Hematopoietic |
| HALSQ59 | W88666 | WO9854963-A2 | Cancer |
| HAIBP89 | W88667 | WO9854963-A2 | Cancer |
| HBXGK12 | W88669 | WO9854963-A2 | Cancer |
| HFKFJ07 | W88670 | WO9854963-A2 | Cancer |
| HCWHZ24 | W88672 | WO9854963-A2 | Immune/Hematopoietic |
| HE2GT20 | W88673 | WO9854963-A2 | Cancer |
| HFTCT67 | W88676 | WO9854963-A2 | Cancer |
| HUSIT49 | W88680 | WO9854963-A2 | Cancer |
| HNHED86 | W88684 | WO9854963-A2 | Immune/Hematopoietic |
| HNHFQ63 | W88686 | WO9854963-A2 | Immune/Hematopoietic |
| HAGDQ47 | W88692 | WO9854963-A2 | Cancer |
| HAICP19 | W88693 | WO9854963-A2 | Cancer |
| HCEQA68 | W88699 | WO9854963-A2 | Neural/Sensory |
| HCFNF11 | W88701 | WO9854963-A2 | Cancer |
| HCRBL20 | W88702 | WO9854963-A2 | Cancer |
| HDSAP81 | W88704 | WO9854963-A2 | Cancer |
| HE2CT29 | W88705 | WO9854963-A2 | Mixed Fetal |
| HE8MG65 | W88706 | WO9854963-A2 | Cancer |
| HE9FB42 | W88707 | WO9854963-A2 | Cancer |
| HEMAM41 | W88708 | WO9854963-A2 | Cancer |
| HEMCV19 | W88709 | WO9854963-A2 | Cancer |
| HETAR54 | W88711 | WO9854963-A2 | Cancer |
| HETBX14 | W88712 | WO9854963-A2 | Cancer |
| HFKFI40 | W88714 | WO9854963-A2 | Cancer |
| HFXHN68 | W88715 | WO9854963-A2 | Cancer |
| HGBFO79 | W88716 | WO9854963-A2 | Cancer |
| HGLAM56 | W88717 | WO9854963-A2 | Cancer |
| HHLBA89 | W88718 | WO9854963-A2 | Digestive |
| HIASB53 | W88723 | WO9854963-A2 | Cancer |
| HJABZ65 | W88724 | WO9854963-A2 | Cancer |
| HJPBB39 | W88725 | WO9854963-A2 | Cancer |
| HLHSK94 | W88726 | WO9854963-A2 | Cancer |
| HLMIW92 | W88728 | WO9854963-A2 | Cancer |
| HLTDB65 | W88730 | WO9854963-A2 | Cancer |
| HNFAH08 | W88733 | WO9854963-A2 | Cancer |
| HNGBE45 | W88735 | WO9854963-A2 | Immune/Hematopoietic, |
| | | | Reproductive |
| HNHCM59 | W88737 | WO9854963-A2 | Cancer |
| HCDEO95 | W88740 | WO9854963-A2 | Immune/Hematopoietic, |
| | | | Musculoskeletal, |
| | | | Reproductive |
| HLMMJ13 | W88741 | WO9854963-A2 | Immune/Hematopoietic, |
| | | | Musculoskeletal, |
| | | | Reproductive |
| HPTWA66 | W88742 | WO9854963-A2 | Cancer |
| HSAVU34 | W88743 | WO9854963-A2 | Cancer |
| HSQEO84 | W88744 | WO9854963-A2 | Cancer |
| HETCH46 | W88745 | WO9854963-A2 | Cancer |
| HWTBF59 | W88746 | WO9854963-A2 | Cancer |
| HCESF40 | W88747 | WO9854963-A2 | Immune/Hematopoietic, |
| | | | Neural/Sensory |
| HOFNZ45 | W88748 | WO9854963-A2 | Reproductive |
| HPWAN23 | W88749 | WO9854963-A2 | Cancer |
| HCRBL20 | W88754 | WO9854963-A2 | Cancer |
| HE8MG65 | W88755 | WO9854963-A2 | Cancer |
| HEMAM41 | W88756 | WO9854963-A2 | Cancer |
| HSAVU34 | W88760 | WO9854963-A2 | Cancer |
| HFHDN80 | W88824 | WO9854963-A2 | Cardiovascular, |
| | | | Digestive, |
| | | | Immune/Hematopoietic |
| HHFHR32 | W88830 | WO9854963-A2 | Cancer |
| HSKCP69 | W89024 | WO9854963-A2 | Cancer |
| HTLCU04 | W89076 | WO9854963-A2 | Cancer |
| HSKHZ53 | W92460 | US5871969-A | Cancer |
| HFIZH13 | W94466 | WO9900415-A1 | Cancer |
| HE9SF68 | W97350 | WO9903982-A1 | Cancer |
| HTECE94 | Y00258 | WO9906423-A1 | Cancer |
| HTWAH05 | Y00259 | WO9906423-A1 | Cancer |
| HAQAN31 | Y00260 | WO9906423-A1 | Cancer |
| HAUAQ39 | Y00261 | WO9906423-A1 | Cancer |
| HBNAU27 | Y00262 | WO9906423-A1 | Cancer |
| HSIDD28 | Y00263 | WO9906423-A1 | Cancer |
| HCABR41 | Y00264 | WO9906423-A1 | Cancer |
| HCUAQ30 | Y00265 | WO9906423-A1 | Immune/Hematopoietic |
| HE2AF21 | Y00266 | WO9906423-A1 | Mixed Fetal |
| HE2DC87 | Y00267 | WO9906423-A1 | Mixed Fetal |
| HE2PO86 | Y00269 | WO9906423-A1 | Cancer |
| HFCBD73 | Y00272 | WO9906423-A1 | Cancer |
| HSVAJ05 | Y00273 | WO9906423-A1 | Cancer |
| HLHSA86 | Y00274 | WO9906423-A1 | Cancer |
| H2CAA57 | Y00278 | WO9906423-A1 | Cancer |
| HADFV30 | Y00279 | WO9906423-A1 | Cancer |
| HAIBO71 | Y00280 | WO9906423-A1 | Connective/Epithelial, |
| | | | Digestive, |
| | | | Immune/Hematopoietic |
| HAPAT76 | Y00281 | WO9906423-A1 | Cancer |
| HLHEB47 | Y00282 | WO9906423-A1 | Cancer |
| HLHEF54 | Y00283 | WO9906423-A1 | Cancer |
| HLMMJ78 | Y00286 | WO9906423-A1 | Immune/Hematopoietic |
| HLQBQ85 | Y00287 | WO9906423-A1 | Cancer |
| HLQBR11 | Y00288 | WO9906423-A1 | Cancer |
| HLWBZ56 | Y00289 | WO9906423-A1 | Cancer |
| HMCAR20 | Y00292 | WO9906423-A1 | Cancer |
| HMCAV55 | Y00293 | WO9906423-A1 | Immune/Hematopoietic |
| HMEFS61 | Y00294 | WO9906423-A1 | Cardiovascular |
| HMEJY78 | Y00295 | WO9906423-A1 | Cancer |
| HMWHH16 | Y00298 | WO9906423-A1 | Immune/Hematopoietic |
| HNFFC27 | Y00300 | WO9906423-A1 | Immune/Hematopoietic |
| HNFFC39 | Y00301 | WO9906423-A1 | Immune/Hematopoietic, |
| | | | Reproductive |
| HNGAM20 | Y00302 | WO9906423-A1 | Immune/Hematopoietic |
| HNGDS53 | Y00304 | WO9906423-A1 | Immune/Hematopoietic |
| HNGEW13 | Y00307 | WO9906423-A1 | Immune/Hematopoietic |
| HNGEY51 | Y00308 | WO9906423-A1 | Immune/Hematopoietic |
| HNGEZ47 | Y00309 | WO9906423-A1 | Immune/Hematopoietic |
| HNGFQ33 | Y00310 | WO9906423-A1 | Immune/Hematopoietic |
| HNGFU38 | Y00311 | WO9906423-A1 | Immune/Hematopoietic |
| HSKXE22 | Y00313 | WO9906423-A1 | Cancer |
| HNHBE49 | Y00314 | WO9906423-A1 | Immune/Hematopoietic |
| HNHEC59 | Y00315 | WO9906423-A1 | Immune/Hematopoietic |
| HNHEI54 | Y00317 | WO9906423-A1 | Immune/Hematopoietic, |
| | | | Reproductive |
| HNHER77 | Y00318 | WO9906423-A1 | Immune/Hematopoietic |
| HNHES40 | Y00319 | WO9906423-A1 | Immune/Hematopoietic |
| HNHEV43 | Y00320 | WO9906423-A1 | Immune/Hematopoietic |
| HNHFL46 | Y00321 | WO9906423-A1 | Immune/Hematopoietic |
| HNHFP80 | Y00322 | WO9906423-A1 | Immune/Hematopoietic |
| HNHFS63 | Y00323 | WO9906423-A1 | Immune/Hematopoietic |
| HNHGC56 | Y00324 | WO9906423-A1 | Immune/Hematopoietic |
| HRDEL61 | Y00328 | WO9906423-A1 | Musculoskeletal |
| HSAUC38 | Y00329 | WO9906423-A1 | Immune/Hematopoietic |
| HSAUF49 | Y00330 | WO9906423-A1 | Immune/Hematopoietic |
| HSAUK57 | Y00331 | WO9906423-A1 | Immune/Hematopoietic |
| HSAUL82 | Y00332 | WO9906423-A1 | Immune/Hematopoietic |
| HSAXI90 | Y00333 | WO9906423-A1 | Immune/Hematopoietic |
| HSDGW43 | Y00335 | WO9906423-A1 | Neural/Sensory |
| HSDJM31 | Y00336 | WO9906423-A1 | Digestive, |
| | | | Neural/Sensory |
| HSDJR23 | Y00337 | WO9906423-A1 | Digestive, |
| | | | Neural/Sensory |
| HSDMA90 | Y00338 | WO9906423-A1 | Digestive, |
| | | | Endocrine, |
| | | | Neural/Sensory |
| HSVAJ05 | Y00340 | WO9906423-A1 | Cancer |
| HAPAT76 | Y00341 | WO9906423-A1 | Cancer |
| HNGAM20 | Y00344 | WO9906423-A1 | Immune/Hematopoietic |
| HTXBK30 | Y01135 | WO9901020-A2 | Cancer |
| H2MBB56 | Y01136 | WO9901020-A2 | Cancer |
| HIBCW32 | Y01138 | WO9901020-A2 | Cancer |
| HLHCI58 | Y01139 | WO9901020-A2 | Cancer |
| HLMFG37 | Y01140 | WO9901020-A2 | Cancer |
| HBCAO31 | Y01141 | WO9901020-A2 | Cancer |
| HRDDR94 | Y01142 | WO9901020-A2 | Cancer |
| HSIDY06 | Y01143 | WO9901020-A2 | Cancer |
| HSKGO49 | Y01144 | WO9901020-A2 | Cancer |
| HBXGM67 | Y01146 | WO9901020-A2 | Neural/Sensory |
| HUFAC36 | Y01147 | WO9901020-A2 | Cancer |
| HAGBZ81 | Y01148 | WO9901020-A2 | Excretory, |
| | | | Neural/Sensory |
| HBJCK69 | Y01150 | WO9901020-A2 | Immune/Hematopoietic |
| HCACJ81 | Y01152 | WO9901020-A2 | Cancer |
| HBMWP47 | Y01154 | WO9901020-A2 | Cancer |
| HIBCW32 | Y01155 | WO9901020-A2 | Cancer |
| HCACJ81 | Y01158 | WO9901020-A2 | Cancer |
| HCE3F11 | Y01206 | WO9901020-A2 | Digestive, |
| | | | Neural/Sensory |
| HSXBV35 | Y01383 | WO9903990-A1 | Neural/Sensory |
| HTGAW51 | Y01385 | WO9903990-A1 | Immune/Hematopoietic |
| HTEGM07 | Y01387 | WO9903990-A1 | Cancer |
| HTWFK09 | Y01389 | WO9903990-A1 | Immune/Hematopoietic |
| HTXDJ88 | Y01390 | WO9903990-A1 | Immune/Hematopoietic |
| HUSGC54 | Y01391 | WO9903990-A1 | Cardiovascular, |
| | | | Immune/Hematopoietic, |
| | | | Neural/Sensory |
| HWTAD49 | Y01392 | WO9903990-A1 | Cancer |
| HWTBK81 | Y01393 | WO9903990-A1 | Cancer |
| HACBH16 | Y01394 | WO9903990-A1 | Connective/Epithelial |
| HCUDE16 | Y01395 | WO9903990-A1 | Cancer |
| HLWBZ73 | Y01397 | WO9903990-A1 | Cancer |
| HNGFR75 | Y01398 | WO9903990-A1 | Immune/Hematopoietic |
| HNHFO29 | Y01400 | WO9903990-A1 | Immune/Hematopoietic |
| HONAH29 | Y01401 | WO9903990-A1 | Cancer |
| HGCAB62 | Y01402 | WO9903990-A1 | Cancer |
| HAQBI01 | Y01403 | WO9903990-A1 | Cancer |
| HDPBA48 | Y01405 | WO9903990-A1 | Immune/Hematopoietic |
| HE6CT22 | Y01406 | WO9903990-A1 | Mixed Fetal, |
| | | | Reproductive |
| HE6CT56 | Y01407 | WO9903990-A1 | Mixed Fetal, |
| | | | Neural/Sensory |
| HE6CY88 | Y01408 | WO9903990-A1 | Mixed Fetal |
| HE9FT63 | Y01409 | WO9903990-A1 | Cancer |
| HE9ND43 | Y01410 | WO9903990-A1 | Digestive, |
| | | | Mixed Fetal, |
| | | | Neural/Sensory |
| HERAN63 | Y01411 | WO9903990-A1 | Connective/Epithelial, |
| | | | Reproductive |
| HHBAG14 | Y01413 | WO9903990-A1 | Cancer |
| HMADU73 | Y01417 | WO9903990-A1 | Cancer |
| HMEAI74 | Y01418 | WO9903990-A1 | Cancer |
| HPMBZ15 | Y01421 | WO9903990-A1 | Cancer |
| HROAE16 | Y01422 | WO9903990-A1 | Cancer |
| HSAYM40 | Y01423 | WO9903990-A1 | Immune/Hematopoietic |
| HTBAB28 | Y01426 | WO9903990-A1 | Immune/Hematopoietic |
| HAQBT52 | Y01428 | WO9903990-A1 | Cancer |
| HBIBL04 | Y01429 | WO9903990-A1 | Cancer |
| HBJCI95 | Y01430 | WO9903990-A1 | Cancer |
| HBNBQ61 | Y01431 | WO9903990-A1 | Reproductive |
| HE2ID06 | Y01432 | WO9903990-A1 | Cancer |
| HEBCM63 | Y01433 | WO9903990-A1 | Cancer |
| HFFAK76 | Y01434 | WO9903990-A1 | Neural/Sensory |
| HFRBF28 | Y01435 | WO9903990-A1 | Neural/Sensory |
| HGBHM89 | Y01436 | WO9903990-A1 | Cancer |
| HLMBP18 | Y01437 | WO9903990-A1 | Immune/Hematopoietic |
| HAGFG63 | Y01439 | WO9903990-A1 | Cancer |
| HODAZ55 | Y01440 | WO9903990-A1 | Reproductive |
| HODDF08 | Y01441 | WO9903990-A1 | Reproductive |
| HOSDK95 | Y01442 | WO9903990-A1 | Musculoskeletal |
| HOUAR65 | Y01443 | WO9903990-A1 | Connective/Epithelial |
| HSVAC77 | Y01444 | WO9903990-A1 | Cancer |
| HRSMC69 | Y01445 | WO9903990-A1 | Cancer |
| HNECF34 | Y01446 | WO9903990-A1 | Immune/Hematopoietic |
| HAQAI46 | Y01447 | WO9903990-A1 | Cancer |
| HAQBI01 | Y01448 | WO9903990-A1 | Cancer |
| HJAAT30 | Y01453 | WO9903990-A1 | Cancer |
| HPMJI58 | Y01458 | WO9903990-A1 | Cancer |
| HNECF34 | Y01477 | WO9903990-A1 | Immune/Hematopoietic |
| HCEIA77 | Y02650 | WO9902546-A1 | Cancer |
| HCFCE10 | Y02651 | WO9902546-A1 | Immune/Hematopoietic |
| HCHAA63 | Y02653 | WO9902546-A1 | Cancer |
| HCNSP40 | Y02654 | WO9902546-A1 | Cancer |
| HDAAC10 | Y02655 | WO9902546-A1 | Cardiovascular, |
| | | | Digestive, |
| | | | Reproductive |
| HE8CV18 | Y02656 | WO9902546-A1 | Cancer |
| HFGAL10 | Y02659 | WO9902546-A1 | Mixed Fetal, |
| | | | Neural/Sensory, |
| | | | Reproductive |
| HFKEB72 | Y02660 | WO9902546-A1 | Excretory, |
| | | | Reproductive |
| HFTCU19 | Y02661 | WO9902546-A1 | Cancer |
| HFXHN31 | Y02662 | WO9902546-A1 | Neural/Sensory |
| HCEND31 | Y02663 | WO9902546-A1 | Cancer |
| HJABB94 | Y02664 | WO9902546-A1 | Cancer |
| HLTAI94 | Y02666 | WO9902546-A1 | Immune/Hematopoietic, |
| | | | Reproductive |
| HMELR03 | Y02668 | WO9902546-A1 | Cardiovascular, |
| | | | Immune/Hematopoietic, |
| | | | Mixed Fetal |
| HMKAH10 | Y02669 | WO9902546-A1 | Neural/Sensory, |
| | | | Reproductive |
| HMKCW19 | Y02670 | WO9902546-A1 | Cancer |
| HMSJW18 | Y02671 | WO9902546-A1 | Cancer |
| HMWGY01 | Y02672 | WO9902546-A1 | Immune/Hematopoietic |
| HNFID82 | Y02673 | WO9902546-A1 | Immune/Hematopoietic |
| HNFIG36 | Y02674 | WO9902546-A1 | Immune/Hematopoietic |
| HNGEV29 | Y02675 | WO9902546-A1 | Immune/Hematopoietic |
| HNGJJ65 | Y02677 | WO9902546-A1 | Immune/Hematopoietic |
| HSLBF69 | Y02687 | WO9902546-A1 | Immune/Hematopoietic, |
| | | | Musculoskeletal, |
| | | | Reproductive |
| HSVBH58 | Y02689 | WO9902546-A1 | Cancer |
| HTADX17 | Y02692 | WO9902546-A1 | Immune/Hematopoietic, |
| | | | Reproductive |
| HTDAD22 | Y02693 | WO9902546-A1 | Cancer |
| HTEDS39 | Y02694 | WO9902546-A1 | Cancer |
| HTEHH53 | Y02695 | WO9902546-A1 | Reproductive |
| HTLDP69 | Y02696 | WO9902546-A1 | Cancer |
| HTPCS60 | Y02698 | WO9902546-A1 | Cancer |
| HUKBH05 | Y02699 | WO9902546-A1 | Cancer |
| HADFK68 | Y02703 | WO9902546-A1 | Connective/Epithelial |
| HADGG19 | Y02704 | WO9902546-A1 | Connective/Epithelial, |
| | | | Musculoskeletal |
| HAEAV45 | Y02705 | WO9902546-A1 | Cardiovascular, |
| | | | Reproductive |
| HARAA15 | Y02706 | WO9902546-A1 | Neural/Sensory |
| HBAFQ54 | Y02708 | WO9902546-A1 | Cancer |
| HBIAS26 | Y02710 | WO9902546-A1 | Cancer |
| HBJFU48 | Y02711 | WO9902546-A1 | Immune/Hematopoietic |
| HBJFV28 | Y02712 | WO9902546-A1 | Immune/Hematopoietic, |
| | | | Mixed Fetal, |
| | | | Neural/Sensory |
| HBMWB01 | Y02713 | WO9902546-A1 | Immune/Hematopoietic |
| HBMXN79 | Y02714 | WO9902546-A1 | Cancer |
| HBMXP84 | Y02715 | WO9902546-A1 | Cancer |
| HCFMM26 | Y02716 | WO9902546-A1 | Immune/Hematopoietic |
| HCNAV36 | Y02717 | WO9902546-A1 | Cancer |
| HCNSB01 | Y02718 | WO9902546-A1 | Cancer |
| HCRBR74 | Y02719 | WO9902546-A1 | Cancer |
| HCUBN59 | Y02720 | WO9902546-A1 | Immune/Hematopoietic |
| HCUDB38 | Y02721 | WO9902546-A1 | Immune/Hematopoietic |
| HCUFZ62 | Y02722 | WO9902546-A1 | Immune/Hematopoietic |
| HDPCO25 | Y02724 | WO9902546-A1 | Immune/Hematopoietic |
| HDPHI51 | Y02725 | WO9902546-A1 | Immune/Hematopoietic |
| HE9FE83 | Y02727 | WO9902546-A1 | Immune/Hematopoietic, |
| | | | Mixed Fetal, |
| | | | Musculoskeletal |
| HFPDE69 | Y02731 | WO9902546-A1 | Neural/Sensory |
| HGBGV89 | Y02732 | WO9902546-A1 | Digestive |
| HGLDE38 | Y02733 | WO9902546-A1 | Cancer |
| HHGDU58 | Y02734 | WO9902546-A1 | Musculoskeletal |
| HHTLF25 | Y02735 | WO9902546-A1 | Cancer |
| HKAFB88 | Y02737 | WO9902546-A1 | Cancer |
| HLHFP03 | Y02738 | WO9902546-A1 | Respiratory |
| HLYAF80 | Y02741 | WO9902546-A1 | Immune/Hematopoietic |
| HMKDD07 | Y02743 | WO9902546-A1 | Immune/Hematopoietic, |
| | | | Neural/Sensory |
| HMKDS08 | Y02744 | WO9902546-A1 | Excretory, |
| | | | Neural/Sensory |
| HMSHM14 | Y02745 | WO9902546-A1 | Immune/Hematopoietic |
| HMWDC28 | Y02746 | WO9902546-A1 | Cancer |
| HNFIU96 | Y02749 | WO9902546-A1 | Immune/Hematopoietic |
| HNGAX58 | Y02751 | WO9902546-A1 | Immune/Hematopoietic |
| HNHDL85 | Y02754 | WO9902546-A1 | Immune/Hematopoietic |
| HNHFU59 | Y02755 | WO9902546-A1 | Immune/Hematopoietic |
| HNHFW22 | Y02756 | WO9902546-A1 | Immune/Hematopoietic |
| HODCJ90 | Y02758 | WO9902546-A1 | Cancer |
| HPEBT80 | Y02760 | WO9902546-A1 | Reproductive |
| HSDAG05 | Y02761 | WO9902546-A1 | Cancer |
| HSDGR57 | Y02762 | WO9902546-A1 | Cancer |
| HSDJJ82 | Y02763 | WO9902546-A1 | Neural/Sensory |
| HSDZM95 | Y02764 | WO9902546-A1 | Cancer |
| HSKYU29 | Y02766 | WO9902546-A1 | Cancer |
| HSNAA55 | Y02767 | WO9902546-A1 | Cancer |
| HSQFP66 | Y02768 | WO9902546-A1 | Excretory, |
| | | | Neural/Sensory |
| HJPBB94 | Y02769 | WO9902546-A1 | Cancer |
| HSSJN64 | Y02770 | WO9902546-A1 | Musculoskeletal |
| HSVAQ28 | Y02771 | WO9902546-A1 | Cancer |
| HFTCU19 | Y02775 | WO9902546-A1 | Cancer |
| HGLAM53 | Y02777 | WO9902546-A1 | Immune/Hematopoietic, |
| | | | Neural/Sensory, |
| | | | Reproductive |
| HMKCW19 | Y02778 | WO9902546-A1 | Cancer |
| HMWGY01 | Y02779 | WO9902546-A1 | Immune/Hematopoietic |
| HSOAH66 | Y02782 | WO9902546-A1 | Digestive |
| HUKEX85 | Y02785 | WO9902546-A1 | Musculoskeletal, |
| | | | Reproductive |
| HSIDI15 | Y02975 | WO9902546-A1 | Digestive, |
| | | | Immune/Hematopoietic |
| HUKEJ46 | Y03850 | WO9909198-A1 | Digestive, |
| | | | Reproductive |
| HPASD50 | Y04120 | WO9909161-A1 | Cancer |
| HPASD50 | Y04121 | WO9909161-A1 | Cancer |
| HSDIT06 | Y04295 | WO9910363-A1 | Neural/Sensory, |
| | | | Reproductive |
| HSKEI54 | Y04297 | WO9910363-A1 | Cancer |
| HTNAG39 | Y04300 | WO9910363-A1 | Cancer |
| HTODL90 | Y04301 | WO9910363-A1 | Immune/Hematopoietic |
| HTWDC20 | Y04302 | WO9910363-A1 | Immune/Hematopoietic |
| HUFAT34 | Y04303 | WO9910363-A1 | Cancer |
| HAICJ23 | Y04305 | WO9910363-A1 | Cancer |
| HAPOF67 | Y04306 | WO9910363-A1 | Digestive, |
| | | | Excretory, |
| | | | Musculoskeletal |
| HE8DG53 | Y04308 | WO9910363-A1 | Cancer |
| HFSAY85 | Y04309 | WO9910363-A1 | Cancer |
| HHEDD41 | Y04310 | WO9910363-A1 | Cancer |
| HKCSO46 | Y04311 | WO9910363-A1 | Cancer |
| HKGAV60 | Y04312 | WO9910363-A1 | Cancer |
| HKGDJ66 | Y04314 | WO9910363-A1 | Cancer |
| HMCDK27 | Y04315 | WO9910363-A1 | Cancer |
| HMCDX48 | Y04316 | WO9910363-A1 | Cancer |
| HMIAS24 | Y04317 | WO9910363-A1 | Immune/Hematopoietic, |
| | | | Neural/Sensory |
| HNFEG11 | Y04318 | WO9910363-A1 | Immune/Hematopoietic |
| HNGEP09 | Y04319 | WO9910363-A1 | Immune/Hematopoietic |
| HTXKK52 | Y04320 | WO9910363-A1 | Immune/Hematopoietic |
| HNGJP90 | Y04321 | WO9910363-A1 | Immune/Hematopoietic |
| HFVIF40 | Y06461 | WO9931116-A1 | Cancer |
| HFCCQ50 | Y06462 | WO9931116-A1 | Cancer |
| HDPIE88 | Y06511 | WO9936565-A1 | Cancer |
| HCWHN10 | Y07746 | WO9909155-A1 | Immune/Hematopoietic |
| HDTAE40 | Y07748 | WO9909155-A1 | Digestive, |
| | | | Immune/Hematopoietic |
| HE8DY08 | Y07751 | WO9909155-A1 | Cancer |
| HE9ND27 | Y07753 | WO9909155-A1 | Cancer |
| HCE3G69 | Y07754 | WO9909155-A1 | Cancer |
| HEAAX57 | Y07755 | WO9909155-A1 | Reproductive |
| HEMGD15 | Y07759 | WO9909155-A1 | Cancer |
| HEQBR95 | Y07760 | WO9909155-A1 | Cancer |
| HFKGE44 | Y07764 | WO9909155-A1 | Cancer |
| HFPCY39 | Y07765 | WO9909155-A1 | Cancer |
| HFXDX75 | Y07768 | WO9909155-A1 | Neural/Sensory |
| HFXJC53 | Y07770 | WO9909155-A1 | Neural/Sensory, |
| | | | Reproductive, |
| | | | Respiratory |
| HFXJW48 | Y07771 | WO9909155-A1 | Cancer |
| HGBGO11 | Y07772 | WO9909155-A1 | Cancer |
| HGBHM10 | Y07773 | WO9909155-A1 | Cancer |
| HSWAY58 | Y07776 | WO9909155-A1 | Cancer |
| HTEIM65 | Y07779 | WO9909155-A1 | Immune/Hematopoietic, |
| | | | Reproductive |
| HTHBX95 | Y07780 | WO9909155-A1 | Cancer |
| HTLDQ56 | Y07781 | WO9909155-A1 | Reproductive |
| HTOFU06 | Y07782 | WO9909155-A1 | Immune/Hematopoietic, |
| | | | Musculoskeletal |
| HTWEE31 | Y07785 | WO9909155-A1 | Immune/Hematopoietic |
| HUSAO56 | Y07789 | WO9909155-A1 | Cancer |
| HUSIJ08 | Y07790 | WO9909155-A1 | Cancer |
| HAGBD57 | Y07791 | WO9909155-A1 | Excretory, |
| | | | Neural/Sensory |
| HBAFA04 | Y07793 | WO9909155-A1 | Cancer |
| HBJES16 | Y07794 | WO9909155-A1 | Cancer |
| HCEFZ05 | Y07796 | WO9909155-A1 | Mixed Fetal, |
| | | | Neural/Sensory, |
| HCFMX95 | Y07797 | WO9909155-A1 | Immune/Hematopoietic |
| HLYHA71 | Y07798 | WO9909155-A1 | Cancer |
| HEBAL06 | Y07800 | WO9909155-A1 | Neural/Sensory |
| HEIAB33 | Y07801 | WO9909155-A1 | Cancer |
| HEPBC02 | Y07802 | WO9909155-A1 | Cancer |
| HFTBY96 | Y07803 | WO9909155-A1 | Immune/Hematopoietic, |
| | | | Neural/Sensory, |
| | | | Reproductive |
| HKMMM61 | Y07804 | WO9909155-A1 | Cancer |
| HLQBQ38 | Y07806 | WO9909155-A1 | Cancer |
| HMKCP66 | Y07807 | WO9909155-A1 | Neural/Sensory |
| HWTAL40 | Y07808 | WO9909155-A1 | Cancer |
| HNHDR03 | Y07809 | WO9909155-A1 | Immune/Hematopoietic |
| HNHFH41 | Y07810 | WO9909155-A1 | Immune/Hematopoietic |
| HNHFI81 | Y07811 | WO9909155-A1 | Immune/Hematopoietic |
| HOSFQ28 | Y07812 | WO9909155-A1 | Cancer |
| HPRAL78 | Y07813 | WO9909155-A1 | Cancer |
| HEAAA85 | Y07814 | WO9909155-A1 | Cancer |
| HDTAR09 | Y07816 | WO9909155-A1 | Cancer |
| HLYHA71 | Y07843 | WO9909155-A1 | Cancer |
| HCWCH14 | Y07852 | WO9918208-A1 | Immune/Hematopoietic |
| HE9MI43 | Y07855 | WO9918208-A1 | Cancer |
| HE2PI29 | Y07859 | WO9918208-A1 | Cancer |
| HLHDP83 | Y07862 | WO9918208-A1 | Cancer |
| HSIAS17 | Y07863 | WO9918208-A1 | Cancer |
| HOSDG32 | Y07866 | WO9918208-A1 | Cancer |
| HMUBU59 | Y07867 | WO9918208-A1 | Cancer |
| HWTCE21 | Y07868 | WO9918208-A1 | Cancer |
| HFIUM15 | Y07869 | WO9918208-A1 | Cancer |
| HTLAF13 | Y07872 | WO9918208-A1 | Reproductive |
| HTLFI93 | Y07873 | WO9918208-A1 | Immune/Hematopoietic, |
| | | | Reproductive, |
| | | | Respiratory |
| HBXGI20 | Y07874 | WO9918208-A1 | Cancer |
| HTPBH21 | Y07875 | WO9918208-A1 | Connective/Epithelial, |
| | | | Digestive, |
| | | | Reproductive |
| HSQAB87 | Y07876 | WO9918208-A1 | Cancer |
| HTEDJ94 | Y07877 | WO9918208-A1 | Cancer |
| HKMLM11 | Y07878 | WO9918208-A1 | Cancer |
| HNEAC05 | Y07879 | WO9918208-A1 | Immune/Hematopoietic |
| HETEW02 | Y07880 | WO9918208-A1 | Cancer |
| HLMCA59 | Y07882 | WO9918208-A1 | Immune/Hematopoietic |
| HOAAC90 | Y07883 | WO9918208-A1 | Musculoskeletal |
| HMEJQ68 | Y07884 | WO9918208-A1 | Cancer |
| HRTAE58 | Y07888 | WO9918208-A1 | Digestive, |
| | | | Reproductive |
| HSKNB54 | Y07889 | WO9918208-A1 | Cancer |
| HSKNT34 | Y07890 | WO9918208-A1 | Cancer |
| HTEDY42 | Y07891 | WO9918208-A1 | Reproductive |
| HTLAA40 | Y07892 | WO9918208-A1 | Reproductive |
| HTNBO91 | Y07893 | WO9918208-A1 | Cancer |
| H6BSD90 | Y07894 | WO9918208-A1 | Cancer |
| HBJBQ35 | Y07895 | WO9918208-A1 | Immune/Hematopoietic |
| HCE1Q89 | Y07896 | WO9918208-A1 | Immune/Hematopoietic, |
| | | | Neural/Sensory |
| HCNSB61 | Y07897 | WO9918208-A1 | Digestive, |
| | | | Immune/Hematopoietic |
| HCDBO20 | Y07898 | WO9918208-A1 | Musculoskeletal, |
| | | | Respiratory |
| HBNAW17 | Y07899 | WO9918208-A1 | Reproductive |
| HEAAH81 | Y07902 | WO9918208-A1 | Cancer |
| HEBAE88 | Y07903 | WO9918208-A1 | Immune/Hematopoietic, |
| | | | Neural/Sensory |
| HFXGV31 | Y07904 | WO9918208-A1 | Neural/Sensory |
| HEAAJ57 | Y07905 | WO9918208-A1 | Immune/Hematopoietic, |
| | | | Reproductive |
| HCFMV71 | Y07906 | WO9918208-A1 | Immune/Hematopoietic |
| HGBDL30 | Y07910 | WO9918208-A1 | Digestive |
| HFKEN81 | Y07911 | WO9918208-A1 | Excretory, |
| | | | Neural/Sensory |
| HFPCX36 | Y07912 | WO9918208-A1 | Neural/Sensory |
| HFRAN90 | Y07913 | WO9918208-A1 | Neural/Sensory |
| HHGBO91 | Y07915 | WO9918208-A1 | Digestive, |
| | | | Reproductive |
| HERAN54 | Y07917 | WO9918208-A1 | Connective/Epithelial |
| HFXDE67 | Y07918 | WO9918208-A1 | Neural/Sensory |
| HFFAD59 | Y07921 | WO9918208-A1 | Neural/Sensory |
| HMDAE65 | Y07923 | WO9918208-A1 | Neural/Sensory |
| HMEGF92 | Y07925 | WO9918208-A1 | Cardiovascular |
| HNGIK36 | Y07926 | WO9918208-A1 | Immune/Hematopoietic |
| HMEJJ27 | Y07927 | WO9918208-A1 | Cardiovascular |
| HNHCY64 | Y07928 | WO9918208-A1 | Immune/Hematopoietic |
| HNHCY94 | Y07929 | WO9918208-A1 | Immune/Hematopoietic |
| HNEBN76 | Y07930 | WO9918208-A1 | Immune/Hematopoietic, |
| | | | Reproductive, |
| | | | Respiratory |
| HMEFT54 | Y07931 | WO9918208-A1 | Cardiovascular, |
| | | | Musculoskeletal, |
| | | | Reproductive |
| HLQBE09 | Y07932 | WO9918208-A1 | Digestive |
| HMWBC11 | Y07933 | WO9918208-A1 | Immune/Hematopoietic |
| HNGJR78 | Y07934 | WO9918208-A1 | Immune/Hematopoietic |
| HNGDP26 | Y07935 | WO9918208-A1 | Immune/Hematopoietic |
| HNGJH63 | Y07936 | WO9918208-A1 | Immune/Hematopoietic |
| HMDAL04 | Y07937 | WO9918208-A1 | Neural/Sensory |
| HMWHX28 | Y07938 | WO9918208-A1 | Immune/Hematopoietic |
| HNHGB09 | Y07942 | WO9918208-A1 | Immune/Hematopoietic |
| HNHHA15 | Y07943 | WO9918208-A1 | Immune/Hematopoietic |
| HHGDC01 | Y07944 | WO9918208-A1 | Cancer |
| HMWGU74 | Y07945 | WO9918208-A1 | Immune/Hematopoietic |
| HNGCF72 | Y07946 | WO9918208-A1 | Immune/Hematopoietic |
| HOACB38 | Y07947 | WO9918208-A1 | Musculoskeletal |
| HLMFD11 | Y07950 | WO9918208-A1 | Immune/Hematopoietic |
| HLYBA22 | Y07952 | WO9918208-A1 | Immune/Hematopoietic |
| HCWCH14 | Y07953 | WO9918208-A1 | Immune/Hematopoietic |
| HBMWF85 | Y10797 | WO9907891-A1 | Immune/Hematopoietic |
| HCDEJ37 | Y10798 | WO9907891-A1 | Immune/Hematopoietic, |
| | | | Musculoskeletal |
| HCE3L18 | Y10799 | WO9907891-A1 | Neural/Sensory |
| HCYBI42 | Y10800 | WO9907891-A1 | Cancer |
| HE6FB81 | Y10801 | WO9907891-A1 | Mixed Fetal |
| HFAMB72 | Y10802 | WO9907891-A1 | Cancer |
| HFCDW42 | Y10803 | WO9907891-A1 | Cancer |
| HFPAE26 | Y10804 | WO9907891-A1 | Neural/Sensory |
| HFXJM91 | Y10805 | WO9907891-A1 | Cancer |
| HJABX32 | Y10807 | WO9907891-A1 | Cancer |
| HJMBW30 | Y10808 | WO9907891-A1 | Cancer |
| HSVAT02 | Y10810 | WO9907891-A1 | Cancer |
| HSVBM90 | Y10811 | WO9907891-A1 | Cancer |
| HSYBL17 | Y10812 | WO9907891-A1 | Cancer |
| HTEBI28 | Y10813 | WO9907891-A1 | Reproductive |
| HTPDS14 | Y10814 | WO9907891-A1 | Cancer |
| HTSGG36 | Y10815 | WO9907891-A1 | Cancer |
| HODCJ27 | Y10816 | WO9907891-A1 | Cancer |
| HTXDB52 | Y10819 | WO9907891-A1 | Immune/Hematopoietic, |
| | | | Musculoskeletal |
| HTXDP60 | Y10820 | WO9907891-A1 | Cancer |
| HTXEB42 | Y10821 | WO9907891-A1 | Cancer |
| HBAFZ29 | Y10824 | WO9907891-A1 | Cancer |
| HBAHA77 | Y10826 | WO9907891-A1 | Cancer |
| HBJEW84 | Y10827 | WO9907891-A1 | Immune/Hematopoietic |
| HBJFE12 | Y10828 | WO9907891-A1 | Immune/Hematopoietic |
| HCFBM53 | Y10830 | WO9907891-A1 | Cancer |
| HCFBQ81 | Y10831 | WO9907891-A1 | Immune/Hematopoietic |
| HCFCI07 | Y10832 | WO9907891-A1 | Immune/Hematopoietic |
| HCFDD76 | Y10833 | WO9907891-A1 | Cancer |
| HCFMJ81 | Y10834 | WO9907891-A1 | Cancer |
| HCFOG45 | Y10835 | WO9907891-A1 | Cancer |
| HCUBN71 | Y10836 | WO9907891-A1 | Immune/Hematopoietic, |
| | | | Reproductive |
| HHEMA75 | Y10837 | WO9907891-A1 | Cancer |
| HHPTJ65 | Y10839 | WO9907891-A1 | Cardiovascular, |
| | | | Musculoskeletal, |
| | | | Neural/Sensory |
| HHSDR11 | Y10840 | WO9907891-A1 | Neural/Sensory |
| HLJDQ62 | Y10842 | WO9907891-A1 | Cancer |
| HKGBS49 | Y10843 | WO9907891-A1 | Reproductive |
| HKISA27 | Y10844 | WO9907891-A1 | Cancer |
| HKIXE06 | Y10845 | WO9907891-A1 | Cancer |
| HKMMV77 | Y10846 | WO9907891-A1 | Excretory, |
| | | | Reproductive |
| HLYAB80 | Y10850 | WO9907891-A1 | Cancer |
| HLYAG19 | Y10851 | WO9907891-A1 | Digestive, |
| | | | Immune/Hematopoietic |
| HLYBY48 | Y10852 | WO9907891-A1 | Immune/Hematopoietic |
| HMUAW28 | Y10853 | WO9907891-A1 | Immune/Hematopoietic, |
| | | | Musculoskeletal |
| HMWHC36 | Y10854 | WO9907891-A1 | Cancer |
| HNFIS82 | Y10856 | WO9907891-A1 | Digestive, |
| | | | Immune/Hematopoietic, |
| | | | Reproductive |
| HNGBO16 | Y10859 | WO9907891-A1 | Immune/Hematopoietic |
| HNGBQ90 | Y10860 | WO9907891-A1 | Cancer |
| HNGBV72 | Y10861 | WO9907891-A1 | Immune/Hematopoietic |
| HNGEG08 | Y10863 | WO9907891-A1 | Immune/Hematopoietic |
| HNGFI02 | Y10864 | WO9907891-A1 | Immune/Hematopoietic |
| HNGGF85 | Y10865 | WO9907891-A1 | Immune/Hematopoietic |
| HNGHM75 | Y10866 | WO9907891-A1 | Immune/Hematopoietic |
| HNGIN84 | Y10867 | WO9907891-A1 | Digestive, |
| | | | Endocrine, |
| | | | Immune/Hematopoietic |
| HNGJH08 | Y10869 | WO9907891-A1 | Immune/Hematopoietic |
| HNHAH01 | Y10870 | WO9907891-A1 | Immune/Hematopoietic |
| HNHET53 | Y10871 | WO9907891-A1 | Immune/Hematopoietic |
| HOABP21 | Y10872 | WO9907891-A1 | Cancer |
| HODAA12 | Y10873 | WO9907891-A1 | Immune/Hematopoietic, |
| | | | Neural/Sensory, |
| | | | Reproductive |
| HFKDH44 | Y10874 | WO9907891-A1 | Cancer |
| HOVAP06 | Y10875 | WO9907891-A1 | Reproductive |
| HPEAE34 | Y10876 | WO9907891-A1 | Reproductive |
| HPTRO86 | Y10877 | WO9907891-A1 | Cancer |
| HSAXJ60 | Y10878 | WO9907891-A1 | Immune/Hematopoietic |
| HSAXM32 | Y10879 | WO9907891-A1 | Cancer |
| HSKND71 | Y10882 | WO9907891-A1 | Mixed Fetal, |
| | | | Musculoskeletal, |
| | | | Neural/Sensory |
| HSOAC84 | Y10883 | WO9907891-A1 | Digestive |
| HFKCF34 | Y10884 | WO9907891-A1 | Cancer |
| HSAAO30 | Y12916 | WO9911293-A1 | Cancer |
| HSQBL21 | Y12917 | WO9911293-A1 | Cancer |
| HTEFU41 | Y12919 | WO9911293-A1 | Immune/Hematopoietic, |
| | | | Reproductive |
| HDPSP54 | Y12920 | WO9911293-A1 | Cancer |
| HELFQ07 | Y12921 | WO9911293-A1 | Cancer |
| HBSAJ16 | Y12923 | WO9911293-A1 | Connective/Epithelial, |
| | | | Musculoskeletal, |
| | | | Reproductive |
| HCEOC41 | Y12924 | WO9911293-A1 | Cancer |
| HCUEO60 | Y12926 | WO9911293-A1 | Immune/Hematopoietic |
| HDHEB60 | Y12927 | WO9911293-A1 | Cancer |
| HE6AJ31 | Y12928 | WO9911293-A1 | Mixed Fetal |
| HFCED59 | Y12929 | WO9911293-A1 | Immune/Hematopoietic, |
| | | | Neural/Sensory |
| HFXKJ03 | Y12931 | WO9911293-A1 | Cardiovascular, |
| | | | Immune/Hematopoietic, |
| | | | Neural/Sensory |
| HHFDG44 | Y12932 | WO9911293-A1 | Cardiovascular, |
| | | | Endocrine, |
| | | | Immune/Hematopoietic |
| HJACG02 | Y12933 | WO9911293-A1 | Digestive, |
| | | | Immune/Hematopoietic |
| HKGAJ54 | Y12934 | WO9911293-A1 | Cancer |
| HKMAB92 | Y12935 | WO9911293-A1 | Cancer |
| HLMFC54 | Y12937 | WO9911293-A1 | Immune/Hematopoietic |
| HLWBZ21 | Y12939 | WO9911293-A1 | Immune/Hematopoietic, |
| | | | Reproductive |
| HMJAX71 | Y12940 | WO9911293-A1 | Neural/Sensory |
| HNECU95 | Y12941 | WO9911293-A1 | Connective/Epithelial, |
| | | | Immune/Hematopoietic |
| HNFCK41 | Y12942 | WO9911293-A1 | Cancer |
| HNFHD08 | Y12943 | WO9911293-A1 | Cancer |
| HNGEW65 | Y12944 | WO9911293-A1 | Endocrine, |
| | | | Immune/Hematopoietic |
| HNHEN68 | Y12946 | WO9911293-A1 | Immune/Hematopoietic |
| HNHFG05 | Y12947 | WO9911293-A1 | Immune/Hematopoietic |
| HODBF19 | Y12948 | WO9911293-A1 | Cancer |
| HOEBK34 | Y12949 | WO9911293-A1 | Digestive, |
| | | | Musculoskeletal |
| HPBCC51 | Y12950 | WO9911293-A1 | Cancer |
| HRGDC48 | Y12951 | WO9911293-A1 | Immune/Hematopoietic, |
| | | | Musculoskeletal |
| HSDJB13 | Y12952 | WO9911293-A1 | Cancer |
| HTEHR24 | Y12953 | WO9911293-A1 | Cancer |
| HARAO51 | Y12957 | WO9911293-A1 | Cancer |
| HATAA15 | Y12958 | WO9911293-A1 | Cancer |
| HATCK44 | Y12959 | WO9911293-A1 | Cancer |
| HBIAE26 | Y12960 | WO9911293-A1 | Neural/Sensory, |
| | | | Reproductive |
| HBMXG32 | Y12961 | WO9911293-A1 | Immune/Hematopoietic |
| HCDAT43 | Y12963 | WO9911293-A1 | Cancer |
| HSLJB89 | Y12964 | WO9911293-A1 | Cancer |
| HBAFC77 | Y12966 | WO9911293-A1 | Cancer |
| HSAAO30 | Y12969 | WO9911293-A1 | Cancer |
| HFCET92 | Y14078 | WO9921575-A1 | Cancer |
| HSIDU19 | Y14411 | WO9919339-A1 | Digestive |
| HPRSB76 | Y14412 | WO9919339-A1 | Reproductive |
| HTEIL66 | Y14413 | WO9919339-A1 | Reproductive |
| HSABG21 | Y14415 | WO9919339-A1 | Cancer |
| HSAXB32 | Y14416 | WO9919339-A1 | Immune/Hematopoietic |
| HPEAD48 | Y14417 | WO9919339-A1 | Reproductive |
| HPVAB94 | Y14418 | WO9919339-A1 | Reproductive |
| HSAXB81 | Y14419 | WO9919339-A1 | Immune/Hematopoietic |
| HSLCU73 | Y14421 | WO9919339-A1 | Musculoskeletal |
| HTEIP36 | Y14423 | WO9919339-A1 | Reproductive |
| HYBAY77 | Y14424 | WO9919339-A1 | Immune/Hematopoietic, |
| | | | Musculoskeletal, |
| | | | Reproductive |
| HROAE78 | Y14425 | WO9919339-A1 | Digestive |
| HSAVP17 | Y14426 | WO9919339-A1 | Immune/Hematopoietic |
| HSIEA14 | Y14427 | WO9919339-A1 | Digestive |
| HPEAD79 | Y14430 | WO9919339-A1 | Reproductive |
| HRDED19 | Y14431 | WO9919339-A1 | Musculoskeletal |
| HSAYS89 | Y14432 | WO9919339-A1 | Immune/Hematopoietic |
| HTODK73 | Y14433 | WO9919339-A1 | Cancer |
| HSVAM10 | Y14434 | WO9919339-A1 | Cancer |
| HSPAA60 | Y14439 | WO9919339-A1 | Digestive |
| HFAEF57 | Y14440 | WO9919339-A1 | Neural/Sensory |
| HEGAH43 | Y14441 | WO9919339-A1 | Digestive, |
| | | | Reproductive |
| HNGBX63 | Y14443 | WO9919339-A1 | Immune/Hematopoietic |
| HE2AG50 | Y14444 | WO9919339-A1 | Digestive, |
| | | | Mixed Fetal, |
| | | | Neural/Sensory |
| HCUIN80 | Y14445 | WO9919339-A1 | Immune/Hematopoietic |
| HADCL29 | Y14446 | WO9919339-A1 | Connective/Epithelial |
| HAPPS89 | Y14447 | WO9919339-A1 | Cancer |
| HFGAH44 | Y14448 | WO9919339-A1 | Cancer |
| HFIHZ96 | Y14449 | WO9919339-A1 | Musculoskeletal |
| HFIUR10 | Y14450 | WO9919339-A1 | Digestive, |
| | | | Immune/Hematopoietic, |
| | | | Musculoskeletal |
| HLDNA86 | Y14451 | WO9919339-A1 | Cancer |
| HCUIO20 | Y14453 | WO9919339-A1 | Immune/Hematopoietic |
| HLTEF12 | Y14454 | WO9919339-A1 | Cancer |
| HCFBJ91 | Y14455 | WO9919339-A1 | Immune/Hematopoietic |
| HHFHP90 | Y14456 | WO9919339-A1 | Cardiovascular |
| HLYCQ48 | Y14457 | WO9919339-A1 | Immune/Hematopoietic |
| HHLAB07 | Y14458 | WO9919339-A1 | Digestive, |
| | | | Immune/Hematopoietic |
| HFOXE30 | Y14459 | WO9919339-A1 | Musculoskeletal |
| HBJEL68 | Y14460 | WO9919339-A1 | Immune/Hematopoietic, |
| | | | Neural/Sensory |
| HFIUR35 | Y14462 | WO9919339-A1 | Musculoskeletal |
| HFIZF58 | Y16587 | US5916769-A | Cancer |
| HNGDJ72 | Y19443 | WO9922243-A1 | Immune/Hematopoietic |
| HNGEO29 | Y19444 | WO9922243-A1 | Immune/Hematopoietic |
| HNHDL95 | Y19445 | WO9922243-A1 | Immune/Hematopoietic |
| HAGDS35 | Y19446 | WO9922243-A1 | Cancer |
| HNGEQ48 | Y19447 | WO9922243-A1 | Immune/Hematopoietic |
| HNGDG40 | Y19448 | WO9922243-A1 | Immune/Hematopoietic |
| HNGEN81 | Y19449 | WO9922243-A1 | Immune/Hematopoietic |
| H2MAC30 | Y19450 | WO9922243-A1 | Cancer |
| HNHFB16 | Y19451 | WO9922243-A1 | Immune/Hematopoietic |
| HPFCL43 | Y19452 | WO9922243-A1 | Cancer |
| HSATR82 | Y19453 | WO9922243-A1 | Immune/Hematopoietic |
| HNHIC21 | Y19455 | WO9922243-A1 | Immune/Hematopoietic |
| HOVCA92 | Y19456 | WO9922243-A1 | Immune/Hematopoietic, |
| | | | Reproductive |
| HSDIL30 | Y19458 | WO9922243-A1 | Neural/Sensory |
| HATDB65 | Y19459 | WO9922243-A1 | Endocrine, |
| | | | Reproductive, |
| | | | Respiratory |
| HTTEA24 | Y19461 | WO9922243-A1 | Digestive, |
| | | | Reproductive |
| HAGDS20 | Y19462 | WO9922243-A1 | Neural/Sensory, |
| | | | Reproductive |
| HSDJM30 | Y19463 | WO9922243-A1 | Digestive, |
| | | | Neural/Sensory |
| HNHEE88 | Y19464 | WO9922243-A1 | Immune/Hematopoietic |
| HSLFD55 | Y19465 | WO9922243-A1 | Musculoskeletal |
| HSAXJ29 | Y19466 | WO9922243-A1 | Immune/Hematopoietic |
| HSFAM39 | Y19467 | WO9922243-A1 | Reproductive |
| HADDZ85 | Y19469 | WO9922243-A1 | Connective/Epithelial, |
| | | | Immune/Hematopoietic, |
| | | | Neural/Sensory |
| HDPCM26 | Y19470 | WO9922243-A1 | Cancer |
| HSZAA13 | Y19471 | WO9922243-A1 | Cancer |
| HDTBP04 | Y19472 | WO9922243-A1 | Digestive, |
| | | | Immune/Hematopoietic |
| HHGCQ54 | Y19473 | WO9922243-A1 | Cancer |
| HSNAB12 | Y19474 | WO9922243-A1 | Cardiovascular |
| HBJID05 | Y19475 | WO9922243-A1 | Immune/Hematopoietic |
| HSNBM49 | Y19476 | WO9922243-A1 | Cancer |
| HJMBF77 | Y19477 | WO9922243-A1 | Cancer |
| HJMBM38 | Y19478 | WO9922243-A1 | Cancer |
| HHGCL33 | Y19479 | WO9922243-A1 | Cancer |
| HCEWE20 | Y19480 | WO9922243-A1 | Endocrine, |
| | | | Immune/Hematopoietic, |
| | | | Neural/Sensory |
| HCUHL13 | Y19481 | WO9922243-A1 | Immune/Hematopoietic |
| HBJHO68 | Y19482 | WO9922243-A1 | Immune/Hematopoietic |
| HCWDV84 | Y19483 | WO9922243-A1 | Immune/Hematopoietic |
| HBXFC78 | Y19484 | WO9922243-A1 | Cancer |
| HE2F145 | Y19485 | WO9922243-A1 | Cancer |
| HEOMG13 | Y19486 | WO9922243-A1 | Digestive, |
| | | | Immune/Hematopoietic, |
| | | | Reproductive |
| HFAMH77 | Y19487 | WO9922243-A1 | Cancer |
| HSVCF20 | Y19488 | WO9922243-A1 | Cancer |
| HISAG02 | Y19489 | WO9922243-A1 | Cancer |
| HCDAF84 | Y19490 | WO9922243-A1 | Musculoskeletal |
| HHAAC17 | Y19491 | WO9922243-A1 | Digestive, |
| | | | Musculoskeletal, |
| | | | Neural/Sensory |
| HEQAG39 | Y19493 | WO9922243-A1 | Cancer |
| HKACH44 | Y19494 | WO9922243-A1 | Cancer |
| HBNBG49 | Y19495 | WO9922243-A1 | Cancer |
| HE2EN04 | Y19496 | WO9922243-A1 | Cancer |
| HSVAA10 | Y19497 | WO9922243-A1 | Cardiovascular |
| HFPBA88 | Y19498 | WO9922243-A1 | Cancer |
| HHEBW54 | Y19500 | WO9922243-A1 | Cancer |
| HFEBH21 | Y19501 | WO9922243-A1 | Connective/Epithelial, |
| | | | Reproductive |
| HFTDZ36 | Y19502 | WO9922243-A1 | Cancer |
| HGLAW96 | Y19503 | WO9922243-A1 | Immune/Hematopoietic, |
| | | | Neural/Sensory |
| HKAFK41 | Y19504 | WO9922243-A1 | Cancer |
| HOSEG51 | Y19505 | WO9922243-A1 | Endocrine, |
| | | | Immune/Hematopoietic, |
| | | | Musculoskeletal |
| HTEJT39 | Y19506 | WO9922243-A1 | Neural/Sensory, |
| | | | Reproductive |
| HPTRH45 | Y19507 | WO9922243-A1 | Cancer |
| HDHMA72 | Y19508 | WO9922243-A1 | Cancer |
| HNTBL27 | Y19509 | WO9922243-A1 | Cancer |
| HCFMX35 | Y19510 | WO9922243-A1 | Immune/Hematopoietic |
| HMUAO21 | Y19512 | WO9922243-A1 | Cancer |
| HCHAR28 | Y19513 | WO9922243-A1 | Cancer |
| HLYDU25 | Y19514 | WO9922243-A1 | Immune/Hematopoietic |
| HOEJH89 | Y19515 | WO9922243-A1 | Cancer |
| HPFDG48 | Y19516 | WO9922243-A1 | Immune/Hematopoietic, |
| | | | Reproductive |
| HWTBM18 | Y19517 | WO9922243-A1 | Immune/Hematopoietic, |
| | | | Musculoskeletal |
| HCFOM18 | Y19518 | WO9922243-A1 | Immune/Hematopoietic |
| HMWFO02 | Y19519 | WO9922243-A1 | Immune/Hematopoietic |
| HNGAV42 | Y19520 | WO9922243-A1 | Immune/Hematopoietic |
| HSDSE75 | Y19522 | WO9922243-A1 | Musculoskeletal, |
| | | | Neural/Sensory, |
| | | | Respiratory |
| HLMFD85 | Y19523 | WO9922243-A1 | Immune/Hematopoietic |
| HLQCJ74 | Y19524 | WO9922243-A1 | Digestive, |
| | | | Immune/Hematopoietic |
| HTEFU65 | Y19526 | WO9922243-A1 | Excretory, |
| | | | Immune/Hematopoietic, |
| | | | Reproductive |
| HLYBF22 | Y19527 | WO9922243-A1 | Immune/Hematopoietic, |
| | | | Mixed Fetal |
| HMDAP35 | Y19528 | WO9922243-A1 | Neural/Sensory |
| HWBCN75 | Y19530 | WO9922243-A1 | Cancer |
| HROAH06 | Y19531 | WO9922243-A1 | Digestive, |
| | | | Immune/Hematopoietic |
| HSAXA83 | Y19532 | WO9922243-A1 | Immune/Hematopoietic |
| HSDJE10 | Y19533 | WO9922243-A1 | Cancer |
| HBAMA40 | Y19534 | WO9922243-A1 | Excretory |
| HBAMB34 | Y19535 | WO9922243-A1 | Excretory, |
| | | | Reproductive |
| HCWKC15 | Y19536 | WO9922243-A1 | Immune/Hematopoietic |
| HDTDM65 | Y19537 | WO9922243-A1 | Cancer |
| HMMBF71 | Y19538 | WO9922243-A1 | Immune/Hematopoietic |
| HPBDH41 | Y19539 | WO9922243-A1 | Immune/Hematopoietic, |
| | | | Musculoskeletal |
| HPBEN24 | Y19540 | WO9922243-A1 | Cancer |
| HCUIM65 | Y19541 | WO9922243-A1 | Cancer |
| HKNAA95 | Y19542 | WO9922243-A1 | Digestive, |
| | | | Excretory, |
| | | | Immune/Hematopoietic |
| HKIYH57 | Y19543 | WO9922243-A1 | Cancer |
| HBJMG49 | Y19546 | WO9922243-A1 | Immune/Hematopoietic |
| H6EDC19 | Y19547 | WO9922243-A1 | Cancer |
| HSKHZ81 | Y19548 | WO9922243-A1 | Cancer |
| HBJFX78 | Y19549 | WO9922243-A1 | Cancer |
| HEMFS60 | Y19550 | WO9922243-A1 | Cancer |
| HKACB56 | Y19551 | WO9922243-A1 | Connective/Epithelial |
| HTXJX80 | Y19552 | WO9922243-A1 | Digestive, |
| | | | Immune/Hematopoietic |
| HAFBD61 | Y19553 | WO9922243-A1 | Cancer |
| HBJJU28 | Y19554 | WO9922243-A1 | Immune/Hematopoietic, |
| | | | Neural/Sensory |
| HNHEI47 | Y19555 | WO9922243-A1 | Immune/Hematopoietic |
| HPMFY74 | Y19556 | WO9922243-A1 | Reproductive |
| HLYAP91 | Y19559 | WO9922243-A1 | Digestive, |
| | | | Immune/Hematopoietic, |
| | | | Reproductive |
| HSKNB56 | Y19560 | WO9922243-A1 | Cancer |
| HHGCW91 | Y19561 | WO9922243-A1 | Digestive, |
| | | | Immune/Hematopoietic |
| HKIYE96 | Y19562 | WO9922243-A1 | Excretory |
| HLYAN59 | Y19563 | WO9922243-A1 | Immune/Hematopoietic |
| HNEEE24 | Y19564 | WO9922243-A1 | Immune/Hematopoietic |
| HAPRK85 | Y19565 | WO9922243-A1 | Cancer |
| HLTEJ06 | Y19566 | WO9922243-A1 | Immune/Hematopoietic |
| HMEKT48 | Y19567 | WO9922243-A1 | Cancer |
| HNGHR74 | Y19568 | WO9922243-A1 | Immune/Hematopoietic |
| HNHED17 | Y19569 | WO9922243-A1 | Immune/Hematopoietic |
| HNHEP59 | Y19570 | WO9922243-A1 | Immune/Hematopoietic |
| HNHFJ25 | Y19571 | WO9922243-A1 | Immune/Hematopoietic |
| HCPAA69 | Y19572 | WO9922243-A1 | Neural/Sensory |
| HEAAR07 | Y19573 | WO9922243-A1 | Reproductive |
| HHGDW43 | Y19574 | WO9922243-A1 | Cancer |
| HHSDX28 | Y19575 | WO9922243-A1 | Immune/Hematopoietic, |
| | | | Neural/Sensory |
| HE8ER60 | Y19576 | WO9922243-A1 | Cancer |
| HMEJQ66 | Y19577 | WO9922243-A1 | Cardiovascular |
| HRDAD66 | Y19578 | WO9922243-A1 | Cancer |
| HCMST14 | Y19579 | WO9922243-A1 | Cancer |
| HCEBA03 | Y19580 | WO9922243-A1 | Neural/Sensory |
| HJAAM10 | Y19582 | WO9922243-A1 | Cancer |
| HOHCC74 | Y19584 | WO9922243-A1 | Cancer |
| HPMPY57 | Y19585 | WO9922243-A1 | Immune/Hematopoietic, |
| | | | Neural/Sensory, |
| | | | Reproductive |
| HFXDN63 | Y19586 | WO9922243-A1 | Neural/Sensory |
| HADCL76 | Y19587 | WO9922243-A1 | Cancer |
| HMMAS76 | Y19588 | WO9922243-A1 | Endocrine, |
| | | | Immune/Hematopoietic |
| HMKCG09 | Y19589 | WO9922243-A1 | Digestive, |
| | | | Endocrine, |
| | | | Neural/Sensory |
| HFPBA88 | Y19590 | WO9922243-A1 | Cancer |
| HMIAH29 | Y19596 | WO9922243-A1 | Cancer |
| HEMFS60 | Y19757 | WO9922243-A1 | Cancer |
| HDPVA94 | Y25708 | WO9938882-A1 | Cancer |
| HDPNE25 | Y25709 | WO9938882-A1 | Cancer |
| HASCG84 | Y25711 | WO9938881-A1 | Cancer |
| HDPCY37 | Y25712 | WO9938881-A1 | Cancer |
| HHEBB10 | Y25713 | WO9938881-A1 | Cancer |
| HNGJA38 | Y25714 | WO9938881-A1 | Immune/Hematopoietic |
| HHENL07 | Y25715 | WO9938881-A1 | Immune/Hematopoietic |
| HKADQ91 | Y25716 | WO9938881-A1 | Cancer |
| HPMCV18 | Y25717 | WO9938881-A1 | Musculoskeletal, |
| | | | Reproductive |
| HKGAK22 | Y25718 | WO9938881-A1 | Endocrine, |
| | | | Excretory, |
| | | | Neural/Sensory |
| HTEHU31 | Y25719 | WO9938881-A1 | Cancer |
| HFXAM76 | Y25720 | WO9938881-A1 | Cancer |
| HFXDZ79 | Y25721 | WO9938881-A1 | Neural/Sensory |
| HOHBC68 | Y25722 | WO9938881-A1 | Cancer |
| HSVAM81 | Y25723 | WO9938881-A1 | Cancer |
| HTXDG40 | Y25724 | WO9938881-A1 | Immune/Hematopoietic |
| HE2FC81 | Y25725 | WO9938881-A1 | Mixed Fetal |
| HJACE05 | Y25726 | WO9938881-A1 | Cancer |
| HADCW30 | Y25727 | WO9938881-A1 | Connective/Epithelial |
| HBMDK25 | Y25728 | WO9938881-A1 | Immune/Hematopoietic |
| HFXKK25 | Y25729 | WO9938881-A1 | Cancer |
| HHEMO80 | Y25730 | WO9938881-A1 | Immune/Hematopoietic |
| HNGEJ53 | Y25731 | WO9938881-A1 | Immune/Hematopoietic |
| HTBAA70 | Y25732 | WO9938881-A1 | Connective/Epithelial, |
| | | | Immune/Hematopoietic, |
| | | | Reproductive |
| HSAYB43 | Y25734 | WO9938881-A1 | Immune/Hematopoietic |
| HSLDS32 | Y25735 | WO9938881-A1 | Cancer |
| HMIAV27 | Y25736 | WO9938881-A1 | Cancer |
| HSQEH50 | Y25737 | WO9938881-A1 | Cancer |
| HKMMU22 | Y25738 | WO9938881-A1 | Excretory |
| HKMMD13 | Y25739 | WO9938881-A1 | Excretory |
| HLDNK64 | Y25740 | WO9938881-A1 | Cancer |
| HRDES01 | Y25741 | WO9938881-A1 | Musculoskeletal |
| HDTDZ50 | Y25742 | WO9938881-A1 | Cancer |
| HETAB45 | Y25743 | WO9938881-A1 | Cancer |
| HFPBD47 | Y25744 | WO9938881-A1 | Cancer |
| HJMBI18 | Y25745 | WO9938881-A1 | Cancer |
| HFXHK73 | Y25746 | WO9938881-A1 | Neural/Sensory |
| HJMBT65 | Y25747 | WO9938881-A1 | Cancer |
| HWHGZ26 | Y25748 | WO9938881-A1 | Cancer |
| HADFY83 | Y25749 | WO9938881-A1 | Cancer |
| HBMTV78 | Y25750 | WO9938881-A1 | Digestive, |
| | | | Immune/Hematopoietic |
| HTXJM03 | Y25751 | WO9938881-A1 | Cancer |
| HUSAT94 | Y25752 | WO9938881-A1 | Cancer |
| HCUEN88 | Y25753 | WO9938881-A1 | Immune/Hematopoietic |
| HCE3F70 | Y25754 | WO9938881-A1 | Cancer |
| HCE5F43 | Y25755 | WO9938881-A1 | Cancer |
| HL2AC08 | Y25756 | WO9938881-A1 | Cancer |
| HCNSM70 | Y25757 | WO9938881-A1 | Cancer |
| HDPTQ73 | Y25758 | WO9938881-A1 | Cancer |
| HTODG13 | Y25759 | WO9938881-A1 | Digestive, |
| | | | Immune/Hematopoietic, |
| | | | Reproductive |
| HE8DR25 | Y25760 | WO9938881-A1 | Excretory, |
| | | | Mixed Fetal, |
| | | | Neural/Sensory |
| HSAAO65 | Y25761 | WO9938881-A1 | Cancer |
| HKGDE09 | Y25762 | WO9938881-A1 | Cancer |
| HMVBS69 | Y25763 | WO9938881-A1 | Cardiovascular, |
| | | | Immune/Hematopoietic |
| HSIDU42 | Y25764 | WO9938881-A1 | Cancer |
| HSKCT36 | Y25765 | WO9938881-A1 | Cancer |
| HSXBU59 | Y25766 | WO9938881-A1 | Immune/Hematopoietic, |
| | | | Neural/Sensory |
| HSSGG82 | Y25767 | WO9938881-A1 | Cancer |
| HE8CH92 | Y25768 | WO9938881-A1 | Cancer |
| HYBAR01 | Y25769 | WO9938881-A1 | Musculoskeletal |
| HTLEF73 | Y25770 | WO9938881-A1 | Cancer |
| HEOMW84 | Y25771 | WO9938881-A1 | Connective/Epithelial, |
| | | | Immune/Hematopoietic |
| HKGAR66 | Y25772 | WO9938881-A1 | Cancer |
| HHPDX20 | Y25773 | WO9938881-A1 | Neural/Sensory |
| HSICV24 | Y25774 | WO9938881-A1 | Cancer |
| HCWBE20 | Y25775 | WO9938881-A1 | Immune/Hematopoietic |
| HSXBM30 | Y25776 | WO9938881-A1 | Cancer |
| HDPCY37 | Y25778 | WO9938881-A1 | Cancer |
| HOSFQ65 | Y25791 | WO9938881-A1 | Cancer |
| HSXBH24 | Y25807 | WO9938881-A1 | Cancer |
| HUSIG64 | Y27567 | WO9924836-A1 | Cancer |
| HATCI78 | Y27568 | WO9924836-A1 | Endocrine |
| HSIDR70 | Y27569 | WO9924836-A1 | Digestive |
| HFADD53 | Y27570 | WO9924836-A1 | Excretory, |
| | | | Neural/Sensory |
| HPMGT51 | Y27571 | WO9924836-A1 | Immune/Hematopoietic, |
| | | | Reproductive |
| HFVAB79 | Y27572 | WO9924836-A1 | Cardiovascular, |
| | | | Digestive, |
| | | | Reproductive |
| HDTBP51 | Y27573 | WO9924836-A1 | Digestive, |
| | | | Immune/Hematopoietic, |
| | | | Reproductive |
| HLHFR19 | Y27574 | WO9924836-A1 | Neural/Sensory, |
| | | | Respiratory |
| HMEET96 | Y27575 | WO9924836-A1 | Cancer |
| HTXCV12 | Y27576 | WO9924836-A1 | Cancer |
| HCEFB70 | Y27577 | WO9924836-A1 | Immune/Hematopoietic, |
| | | | Neural/Sensory |
| HDTAV25 | Y27578 | WO9924836-A1 | Cancer |
| HSATA21 | Y27579 | WO9924836-A1 | Immune/Hematopoietic |
| HKIXI03 | Y27580 | WO9924836-A1 | Excretory |
| HDTDC56 | Y27581 | WO9924836-A1 | Cancer |
| HLTBF35 | Y27582 | WO9924836-A1 | Cancer |
| HEPAB80 | Y27583 | WO9924836-A1 | Reproductive |
| HFOXB13 | Y27584 | WO9924836-A1 | Musculoskeletal |
| HTOAK16 | Y27585 | WO9924836-A1 | Cardiovascular, |
| | | | Connective/Epithelial, |
| | | | Immune/Hematopoietic |
| HBXDC63 | Y27586 | WO9924836-A1 | Neural/Sensory |
| HASAU43 | Y27587 | WO9924836-A1 | Immune/Hematopoietic |
| HAGEA31 | Y27588 | WO9924836-A1 | Cancer |
| HTXHB33 | Y27590 | WO9924836-A1 | Immune/Hematopoietic |
| HMWFT65 | Y27591 | WO9924836-A1 | Immune/Hematopoietic |
| HNGAZ68 | Y27592 | WO9924836-A1 | Cardiovascular, |
| | | | Immune/Hematopoietic |
| HTWFH07 | Y27593 | WO9924836-A1 | Immune/Hematopoietic |
| HMQDF12 | Y27594 | WO9924836-A1 | Cancer |
| HFABH95 | Y27595 | WO9924836-A1 | Digestive, |
| | | | Neural/Sensory, |
| | | | Reproductive |
| HNGDD48 | Y27596 | WO9924836-A1 | Immune/Hematopoietic |
| HPMBY46 | Y27597 | WO9924836-A1 | Cancer |
| HRKPA09 | Y27598 | WO9924836-A1 | Cancer |
| HAGAQ26 | Y27599 | WO9924836-A1 | Cancer |
| HCWFL55 | Y27600 | WO9924836-A1 | Immune/Hematopoietic |
| HKAAE44 | Y27601 | WO9924836-A1 | Cancer |
| HNGEU90 | Y27602 | WO9924836-A1 | Immune/Hematopoietic |
| HCFCC07 | Y27603 | WO9924836-A1 | Digestive, |
| | | | Immune/Hematopoietic |
| HLWBI63 | Y27604 | WO9924836-A1 | Cancer |
| HDUAC77 | Y27605 | WO9924836-A1 | Immune/Hematopoietic, |
| | | | Mixed Fetal, |
| | | | Neural/Sensory |
| HFOYV27 | Y27606 | WO9924836-A1 | Cancer |
| HGBHI35 | Y27607 | WO9924836-A1 | Cancer |
| HRDEU27 | Y27608 | WO9924836-A1 | Musculoskeletal |
| HNGJE50 | Y27609 | WO9924836-A1 | Immune/Hematopoietic |
| HNHDU48 | Y27610 | WO9924836-A1 | Immune/Hematopoietic |
| HFXJU68 | Y27611 | WO9924836-A1 | Immune/Hematopoietic, |
| | | | Neural/Sensory |
| HMMAH60 | Y27612 | WO9924836-A1 | Immune/Hematopoietic |
| HNGFR31 | Y27613 | WO9924836-A1 | Immune/Hematopoietic |
| HFPDB26 | Y27614 | WO9924836-A1 | Immune/Hematopoietic, |
| | | | Neural/Sensory, |
| | | | Reproductive |
| HFRAW86 | Y27615 | WO9924836-A1 | Neural/Sensory |
| HTEDX90 | Y27616 | WO9924836-A1 | Reproductive |
| HTXGG45 | Y27617 | WO9924836-A1 | Immune/Hematopoietic |
| HTXJI95 | Y27618 | WO9924836-A1 | Immune/Hematopoietic, |
| | | | Reproductive |
| HLYBD32 | Y27619 | WO9924836-A1 | Immune/Hematopoietic |
| HROAJ03 | Y27621 | WO9924836-A1 | Cancer |
| HTXAJ12 | Y27622 | WO9924836-A1 | Immune/Hematopoietic |
| HKAEL80 | Y27623 | WO9924836-A1 | Connective/Epithelial, |
| | | | Immune/Hematopoietic |
| HNHFL04 | Y27624 | WO9924836-A1 | Immune/Hematopoietic |
| HPCAM01 | Y27625 | WO9924836-A1 | Cancer |
| HJACA79 | Y27626 | WO9924836-A1 | Immune/Hematopoietic |
| HMSFI26 | Y27628 | WO9924836-A1 | Immune/Hematopoietic |
| HMSJR08 | Y27629 | WO9924836-A1 | Immune/Hematopoietic |
| HMWIO93 | Y27630 | WO9924836-A1 | Cancer |
| HNGAK47 | Y27631 | WO9924836-A1 | Immune/Hematopoietic |
| HNGAL31 | Y27632 | WO9924836-A1 | Immune/Hematopoietic |
| HNGIZ06 | Y27633 | WO9924836-A1 | Immune/Hematopoietic |
| HNHBI75 | Y27634 | WO9924836-A1 | Immune/Hematopoietic |
| HOFNT24 | Y27635 | WO9924836-A1 | Reproductive |
| HSAXI95 | Y27636 | WO9924836-A1 | Immune/Hematopoietic |
| HCMTB45 | Y27637 | WO9924836-A1 | Cardiovascular, |
| | | | Immune/Hematopoietic, |
| | | | Mixed Fetal |
| HE9CP41 | Y27638 | WO9924836-A1 | Immune/Hematopoietic, |
| | | | Mixed Fetal |
| HHENV10 | Y27639 | WO9924836-A1 | Immune/Hematopoietic |
| HSKDD72 | Y27640 | WO9924836-A1 | Digestive, |
| | | | Musculoskeletal |
| HAGDO20 | Y27641 | WO9924836-A1 | Cancer |
| HCFBH15 | Y27642 | WO9924836-A1 | Immune/Hematopoietic |
| HSYBX48 | Y27643 | WO9924836-A1 | Cancer |
| HATDQ62 | Y27644 | WO9924836-A1 | Cancer |
| HMEJE13 | Y27645 | WO9924836-A1 | Cancer |
| HNAAF65 | Y27646 | WO9924836-A1 | Cancer |
| HNFHY30 | Y27647 | WO9924836-A1 | Immune/Hematopoietic |
| HNFIR81 | Y27648 | WO9924836-A1 | Cancer |
| HNTBI57 | Y27649 | WO9924836-A1 | Cancer |
| HSAYR13 | Y27650 | WO9924836-A1 | Immune/Hematopoietic |
| HTOHV49 | Y27651 | WO9924836-A1 | Immune/Hematopoietic |
| HSFAG37 | Y27652 | WO9924836-A1 | Cancer |
| HTXBU52 | Y27653 | WO9924836-A1 | Cancer |
| HLHFP18 | Y27654 | WO9924836-A1 | Cancer |
| HFXBW09 | Y27655 | WO9924836-A1 | Neural/Sensory |
| HNGIO59 | Y27656 | WO9924836-A1 | Immune/Hematopoietic |
| HNGJF92 | Y27657 | WO9924836-A1 | Immune/Hematopoietic |
| HMEED18 | Y27658 | WO9924836-A1 | Cancer |
| HMIAM45 | Y27659 | WO9924836-A1 | Neural/Sensory |
| HSAVK10 | Y27660 | WO9924836-A1 | Immune/Hematopoietic |
| HSDHC81 | Y27661 | WO9924836-A1 | Immune/Hematopoietic, |
| | | | Neural/Sensory |
| HSLCT04 | Y27662 | WO9924836-A1 | Mixed Fetal, |
| | | | Musculoskeletal |
| HMDAB56 | Y27663 | WO9924836-A1 | Immune/Hematopoietic, |
| | | | Neural/Sensory |
| HUDBZ89 | Y27664 | WO9924836-A1 | Cancer |
| HLYCT47 | Y27665 | WO9924836-A1 | Digestive, |
| | | | Immune/Hematopoietic |
| HOSDJ25 | Y27666 | WO9924836-A1 | Cancer |
| HADAO89 | Y27667 | WO9924836-A1 | Connective/Epithelial |
| HMSGB14 | Y27668 | WO9924836-A1 | Cancer |
| HPMGD01 | Y27669 | WO9924836-A1 | Cancer |
| HNHFU32 | Y27670 | WO9924836-A1 | Immune/Hematopoietic |
| HMIAL40 | Y27671 | WO9924836-A1 | Musculoskeletal, |
| | | | Neural/Sensory |
| HAMFY69 | Y27672 | WO9924836-A1 | Cancer |
| HBMCT17 | Y27673 | WO9924836-A1 | Immune/Hematopoietic, |
| | | | Neural/Sensory |
| HEBFI91 | Y27674 | WO9924836-A1 | Neural/Sensory |
| HHEAH86 | Y27675 | WO9924836-A1 | Cancer |
| HTPCS72 | Y27677 | WO9924836-A1 | Cancer |
| HFFAL36 | Y27678 | WO9924836-A1 | Neural/Sensory |
| HFXBT12 | Y27679 | WO9924836-A1 | Immune/Hematopoietic, |
| | | | Neural/Sensory |
| HNGJF70 | Y27680 | WO9924836-A1 | Immune/Hematopoietic |
| HATEE46 | Y27681 | WO9924836-A1 | Cancer |
| HJMBN89 | Y27682 | WO9924836-A1 | Cancer |
| HNHEK61 | Y27683 | WO9924836-A1 | Immune/Hematopoietic |
| HEQAO65 | Y27684 | WO9924836-A1 | Cancer |
| HFCDV54 | Y27685 | WO9924836-A1 | Cancer |
| HHEAD14 | Y27686 | WO9924836-A1 | Cancer |
| HGBHE57 | Y27687 | WO9924836-A1 | Cancer |
| HGLAF75 | Y27688 | WO9924836-A1 | Digestive, |
| | | | Immune/Hematopoietic, |
| | | | Reproductive |
| HHEMQ28 | Y27689 | WO9924836-A1 | Digestive, |
| | | | Immune/Hematopoietic, |
| | | | Neural/Sensory |
| HERAR44 | Y27691 | WO9924836-A1 | Connective/Epithelial, |
| | | | Reproductive |
| HYBAV65 | Y28640 | WO9940183-A1 | Immune/Hematopoietic, |
| | | | Musculoskeletal |
| HETBA38 | Y28643 | WO9940183-A1 | Digestive, |
| | | | Mixed Fetal, |
| | | | Reproductive |
| HCE1Q30 | Y30701 | WO9943693-A1 | Immune/Hematopoietic, |
| | | | Neural/Sensory |
| HAGBP70 | Y30702 | WO9943693-A1 | Cancer |
| HBCAY27 | Y30703 | WO9943693-A1 | Immune/Hematopoietic, |
| | | | Neural/Sensory |
| HCACU58 | Y30704 | WO9943693-A1 | Immune/Hematopoietic |
| HCWLD74 | Y30705 | WO9943693-A1 | Immune/Hematopoietic |
| HDPFP29 | Y30706 | WO9943693-A1 | Cancer |
| HDPPH47 | Y30707 | WO9943693-A1 | Cancer |
| HFEAN33 | Y30708 | WO9943693-A1 | Cancer |
| HFEAT91 | Y30709 | WO9943693-A1 | Connective/Epithelial, |
| | | | Reproductive |
| HFPAO71 | Y30710 | WO9943693-A1 | Cancer |
| HLWAA17 | Y30711 | WO9943693-A1 | Cancer |
| HLYCQ18 | Y30712 | WO9943693-A1 | Immune/Hematopoietic |
| HOSFG70 | Y30713 | WO9943693-A1 | Cancer |
| HSSAJ29 | Y30714 | WO9943693-A1 | Cancer |
| HUSIF44 | Y30715 | WO9943693-A1 | Cancer |
| H6EDX46 | Y30716 | WO9943693-A1 | Cancer |
| HABAG37 | Y30717 | WO9943693-A1 | Cancer |
| HACBD91 | Y30718 | WO9943693-A1 | Cancer |
| HADEH21 | Y30719 | WO9943693-A1 | Cancer |
| HAGHD57 | Y30720 | WO9943693-A1 | Cancer |
| HAGHR69 | Y30721 | WO9943693-A1 | Cancer |
| HAHDB16 | Y30722 | WO9943693-A1 | Cardiovascular |
| HAHDR32 | Y30723 | WO9943693-A1 | Cancer |
| HAJAW93 | Y30724 | WO9943693-A1 | Cancer |
| HAJBR69 | Y30725 | WO9943693-A1 | Connective/Epithelial, |
| | | | Immune/Hematopoietic, |
| | | | Musculoskeletal |
| HAMGO32 | Y30726 | WO9943693-A1 | Reproductive |
| HATBR65 | Y30727 | WO9943693-A1 | Cancer |
| HBJLD29 | Y30728 | WO9943693-A1 | Immune/Hematopoietic |
| HBJNB13 | Y30729 | WO9943693-A1 | Immune/Hematopoietic |
| HCE2F54 | Y30730 | WO9943693-A1 | Cancer |
| HCE3C52 | Y30731 | WO9943693-A1 | Cancer |
| HCEEA88 | Y30732 | WO9943693-A1 | Cancer |
| HCEFE96 | Y30733 | WO9943693-A1 | Cancer |
| HCEIF12 | Y30734 | WO9943693-A1 | Cancer |
| HCEOR67 | Y30735 | WO9943693-A1 | Neural/Sensory |
| HCEVB76 | Y30736 | WO9943693-A1 | Cancer |
| HNTOA17 | Y30737 | WO9943693-A1 | Cancer |
| HDPOW86 | Y30811 | WO9940100-A1 | Cancer |
| HSYAG26 | Y30812 | WO9940100-A1 | Cancer |
| HLHCH40 | Y30813 | WO9940100-A1 | Cancer |
| HPLBM85 | Y30814 | WO9940100-A1 | Cancer |
| HLMBO76 | Y30815 | WO9940100-A1 | Excretory, |
| | | | Immune/Hematopoietic, |
| | | | Reproductive |
| HLQDR48 | Y30816 | WO9940100-A1 | Digestive |
| HOHBY12 | Y30817 | WO9940100-A1 | Musculoskeletal |
| HOSEK86 | Y30818 | WO9940100-A1 | Cancer |
| HAJBZ75 | Y30819 | WO9940100-A1 | Cancer |
| HAGCH75 | Y30820 | WO9940100-A1 | Neural/Sensory |
| HE8MH91 | Y30821 | WO9940100-A1 | Cancer |
| HISCJ55 | Y30822 | WO9940100-A1 | Digestive |
| HKISB57 | Y30823 | WO9940100-A1 | Cancer |
| HTEBJ71 | Y30824 | WO9940100-A1 | Cancer |
| HCWGA40 | Y30825 | WO9940100-A1 | Cancer |
| HFCEW05 | Y30826 | WO9940100-A1 | Cardiovascular, |
| | | | Neural/Sensory |
| HCEPF19 | Y30827 | WO9940100-A1 | Cancer |
| HTACZ01 | Y30828 | WO9940100-A1 | Immune/Hematopoietic |
| HUDAM89 | Y30829 | WO9940100-A1 | Reproductive |
| HSAXF60 | Y30830 | WO9940100-A1 | Immune/Hematopoietic |
| HTOGR42 | Y30831 | WO9940100-A1 | Immune/Hematopoietic |
| HMVBN46 | Y30832 | WO9940100-A1 | Immune/Hematopoietic, |
| | | | Neural/Sensory |
| HUVEB53 | Y30833 | WO9940100-A1 | Cancer |
| HSVBU91 | Y30834 | WO9940100-A1 | Cancer |
| HTXFL30 | Y30835 | WO9940100-A1 | Cancer |
| HAGAM64 | Y30836 | WO9940100-A1 | Neural/Sensory |
| HE2PH36 | Y30837 | WO9940100-A1 | Digestive, |
| | | | Immune/Hematopoietic, |
| | | | Mixed Fetal |
| HGBDY06 | Y30838 | WO9940100-A1 | Cancer |
| HWBAO62 | Y30839 | WO9940100-A1 | Connective/Epithelial, |
| | | | Immune/Hematopoietic |
| HBAFJ33 | Y30840 | WO9940100-A1 | Cancer |
| HFXDJ75 | Y30841 | WO9940100-A1 | Neural/Sensory |
| HFPCY04 | Y30842 | WO9940100-A1 | Neural/Sensory |
| HSNBG78 | Y30843 | WO9940100-A1 | Connective/Epithelial, |
| | | | Digestive, |
| | | | Immune/Hematopoietic |
| HBQAB27 | Y30844 | WO9940100-A1 | Endocrine, |
| | | | Neural/Sensory |
| HTOJY21 | Y30845 | WO9940100-A1 | Cancer |
| HHTMM30 | Y30846 | WO9940100-A1 | Cancer |
| HLTAF58 | Y30847 | WO9940100-A1 | Digestive, |
| | | | Immune/Hematopoietic |
| HELFG13 | Y30848 | WO9940100-A1 | Cancer |
| HHFDM48 | Y30849 | WO9940100-A1 | Cardiovascular, |
| | | | Neural/Sensory, |
| | | | Reproductive |
| HKABI84 | Y30850 | WO9940100-A1 | Cancer |
| HMVAX72 | Y30851 | WO9940100-A1 | Cancer |
| HODDN60 | Y30852 | WO9940100-A1 | Cancer |
| HPMEI44 | Y30853 | WO9940100-A1 | Cancer |
| HNGJP69 | Y30854 | WO9940100-A1 | Immune/Hematopoietic |
| HPWBA10 | Y30855 | WO9940100-A1 | Immune/Hematopoietic, |
| | | | Reproductive |
| HLHCH40 | Y30856 | WO9940100-A1 | Cancer |
| HTACZ01 | Y30857 | WO9940100-A1 | Immune/Hematopoietic |
| HTOGR42 | Y30858 | WO9940100-A1 | Immune/Hematopoietic |
| HTAEK53 | Y31811 | WO9947538-A1 | Cancer |
| HFCCQ50 | Y36224 | WO9931117-A1 | Cancer |
| HTLAI54 | Y36225 | WO9931117-A1 | Reproductive |
| HLWBF94 | Y36227 | WO9931117-A1 | Endocrine, |
| | | | Neural/Sensory, |
| | | | Reproductive |
| HFKFF78 | Y36228 | WO9931117-A1 | Excretory |
| HSYBG37 | Y36229 | WO9931117-A1 | Cancer |
| HTHCA77 | Y36230 | WO9931117-A1 | Immune/Hematopoietic |
| HNHEZ51 | Y36231 | WO9931117-A1 | Immune/Hematopoietic |
| HFIAX46 | Y36232 | WO9931117-A1 | Cardiovascular, |
| | | | Musculoskeletal |
| HFOXO72 | Y36233 | WO9931117-A1 | Cancer |
| HODDW40 | Y36234 | WO9931117-A1 | Cardiovascular, |
| | | | Immune/Hematopoietic, |
| | | | Reproductive |
| HSAWG42 | Y36235 | WO9931117-A1 | Immune/Hematopoietic |
| HBMSK09 | Y36236 | WO9931117-A1 | Digestive, |
| | | | Immune/Hematopoietic, |
| | | | Musculoskeletal |
| HDPAU16 | Y36237 | WO9931117-A1 | Cancer |
| HFEBE12 | Y36238 | WO9931117-A1 | Cancer |
| HFLNB64 | Y36239 | WO9931117-A1 | Cancer |
| HSAWZ41 | Y36240 | WO9931117-A1 | Immune/Hematopoietic |
| HNFJF07 | Y36241 | WO9931117-A1 | Immune/Hematopoietic, |
| | | | Neural/Sensory |
| HNGJO57 | Y36242 | WO9931117-A1 | Immune/Hematopoietic |
| HE7TM22 | Y36243 | WO9931117-A1 | Mixed Fetal |
| HFRBR70 | Y36244 | WO9931117-A1 | Cancer |
| HTHBK35 | Y36245 | WO9931117-A1 | Immune/Hematopoietic |
| HWABA81 | Y36246 | WO9931117-A1 | Immune/Hematopoietic |
| HKGAA73 | Y36247 | WO9931117-A1 | Cancer |
| HKIYP40 | Y36248 | WO9931117-A1 | Cancer |
| HKMMW74 | Y36249 | WO9931117-A1 | Excretory |
| HLFBI27 | Y36250 | WO9931117-A1 | Respiratory |
| HLQCWS4 | Y36251 | WO9931117-A1 | Digestive |
| HBNAV22 | Y36252 | WO9931117-A1 | Digestive, |
| | | | Reproductive |
| HTEAM34 | Y36253 | WO9931117-A1 | Reproductive |
| HTHDK34 | Y36254 | WO9931117-A1 | Digestive, |
| | | | Immune/Hematopoietic |
| H6BSG32 | Y36255 | WO9931117-A1 | Cardiovascular, |
| | | | Immune/Hematopoietic, |
| | | | Musculoskeletal |
| HAECA01 | Y36256 | WO9931117-A1 | Cancer |
| HDTEL03 | Y36257 | WO9931117-A1 | Cancer |
| HFXDT43 | Y36258 | WO9931117-A1 | Neural/Sensory |
| HNGHQ09 | Y36259 | WO9931117-A1 | Immune/Hematopoietic |
| HHGDF16 | Y36260 | WO9931117-A1 | Cancer |
| HJBCG12 | Y36261 | WO9931117-A1 | Cancer |
| HOGAW62 | Y36262 | WO9931117-A1 | Immune/Hematopoietic, |
| | | | Reproductive |
| HSWBJ74 | Y36263 | WO9931117-A1 | Cancer |
| HGBHR26 | Y36264 | WO9931117-A1 | Digestive |
| HKDBF34 | Y36265 | WO9931117-A1 | Cancer |
| H6EAB28 | Y36266 | WO9931117-A1 | Cancer |
| HLWAO22 | Y36267 | WO9931117-A1 | Cancer |
| HAGFH53 | Y36268 | WO9931117-A1 | Cancer |
| HHENQ22 | Y36269 | WO9931117-A1 | Immune/Hematopoietic |
| HKMLK53 | Y36270 | WO9931117-A1 | Excretory, |
| | | | Mixed Fetal |
| HSKGQ58 | Y36271 | WO9931117-A1 | Cancer |
| HADXB45 | Y36272 | WO9931117-A1 | Cancer |
| HAIBZ39 | Y36273 | WO9931117-A1 | Cancer |
| HBXFP23 | Y36274 | WO9931117-A1 | Cancer |
| HEQBF32 | Y36275 | WO9931117-A1 | Cancer |
| HETHE81 | Y36276 | WO9931117-A1 | Cancer |
| HFPAC12 | Y36277 | WO9931117-A1 | Cancer |
| H6EFA77 | Y36278 | WO9931117-A1 | Cancer |
| HFXHD88 | Y36279 | WO9931117-A1 | Neural/Sensory |
| HFOXV65 | Y36280 | WO9931117-A1 | Immune/Hematopoietic, |
| | | | Musculoskeletal, |
| | | | Reproductive |
| HKADX21 | Y36281 | WO9931117-A1 | Cancer |
| HPZAB47 | Y36282 | WO9931117-A1 | Cancer |
| HAGFE79 | Y36283 | WO9931117-A1 | Cancer |
| HCE1X60 | Y36284 | WO9931117-A1 | Neural/Sensory |
| HFXKD36 | Y36285 | WO9931117-A1 | Digestive, |
| | | | Musculoskeletal, |
| | | | Neural/Sensory |
| HBMCU71 | Y36286 | WO9931117-A1 | Immune/Hematopoietic |
| HTEIV80 | Y36287 | WO9931117-A1 | Reproductive |
| HFIAP16 | Y36288 | WO9931117-A1 | Musculoskeletal |
| HODAV86 | Y36289 | WO9931117-A1 | Reproductive |
| HTEDF80 | Y36290 | WO9931117-A1 | Reproductive |
| HTODJ69 | Y36291 | WO9931117-A1 | Immune/Hematopoietic |
| HE6GR02 | Y36292 | WO9931117-A1 | Immune/Hematopoietic, |
| | | | Mixed Fetal |
| HAPNY86 | Y36293 | WO9931117-A1 | Cancer |
| HTLDR33 | Y36294 | WO9931117-A1 | Immune/Hematopoietic, |
| | | | Reproductive |
| HACBI61 | Y36295 | WO9931117-A1 | Cancer |
| HMEIK34 | Y36296 | WO9931117-A1 | Cancer |
| HKAAK02 | Y36297 | WO9931117-A1 | Cancer |
| HEPAA46 | Y36298 | WO9931117-A1 | Reproductive |
| HFPCX09 | Y36299 | WO9931117-A1 | Mixed Fetal, |
| | | | Neural/Sensory |
| HLWAA88 | Y36300 | WO9931117-A1 | Cancer |
| HOHBV89 | Y36301 | WO9931117-A1 | Musculoskeletal, |
| | | | Reproductive |
| HCEFL57 | Y36302 | WO9931117-A1 | Cancer |
| HMEKU83 | Y36303 | WO9931117-A1 | Cardiovascular, |
| | | | Immune/Hematopoietic, |
| | | | Reproductive |
| HOSBY40 | Y36304 | WO9931117-A1 | Digestive, |
| | | | Immune/Hematopoietic, |
| | | | Musculoskeletal |
| HKFBH93 | Y36305 | WO9931117-A1 | Digestive, |
| | | | Reproductive |
| HMTAD67 | Y36306 | WO9931117-A1 | Cancer |
| HTEBP77 | Y36307 | WO9931117-A1 | Immune/Hematopoietic, |
| | | | Reproductive |
| HE9CO69 | Y36308 | WO9931117-A1 | Cancer |
| HCACV51 | Y36309 | WO9931117-A1 | Cancer |
| HHPBI45 | Y36310 | WO9931117-A1 | Cardiovascular, |
| | | | Neural/Sensory |
| HLQDH79 | Y36311 | WO9931117-A1 | Cancer |
| HNGFJ67 | Y36312 | WO9931117-A1 | Immune/Hematopoietic |
| HEIAC52 | Y36313 | WO9931117-A1 | Cancer |
| HFXKL58 | Y36314 | WO9931117-A1 | Cancer |
| HMVAM60 | Y36315 | WO9931117-A1 | Cancer |
| HMVBR22 | Y36316 | WO9931117-A1 | Cancer |
| HPJCW04 | Y36317 | WO9931117-A1 | Reproductive |
| HSIDJ81 | Y36318 | WO9931117-A1 | Digestive |
| HSLFU05 | Y36319 | WO9931117-A1 | Cancer |
| HEQAK71 | Y36320 | WO9931117-A1 | Cancer |
| HOSEQ49 | Y36321 | WO9931117-A1 | Cancer |
| HRAAM50 | Y36322 | WO9931117-A1 | Excretory, |
| | | | Immune/Hematopoietic, |
| | | | Mixed Fetal |
| HSDFW45 | Y36323 | WO9931117-A1 | Neural/Sensory |
| HSLCQ82 | Y36324 | WO9931117-A1 | Cancer |
| HSSFT08 | Y36325 | WO9931117-A1 | Musculoskeletal |
| HTOIW31 | Y36326 | WO9931117-A1 | Immune/Hematopoietic, |
| | | | Neural/Sensory, |
| | | | Reproductive |
| HTXKQ85 | Y36327 | WO9931117-A1 | Immune/Hematopoietic, |
| | | | Musculoskeletal, |
| | | | Reproductive |
| HUFBK08 | Y36328 | WO9931117-A1 | Digestive, |
| | | | Musculoskeletal |
| HBJEE48 | Y36330 | WO9931117-A1 | Cancer |
| HBXGH74 | Y36331 | WO9931117-A1 | Neural/Sensory |
| HISBM03 | Y36332 | WO9931117-A1 | Cancer |
| HETCH46 | Y36333 | WO9931117-A1 | Cancer |
| HFPCX09 | Y36335 | WO9931117-A1 | Mixed Fetal, |
| | | | Neural/Sensory |
| HLWAA88 | Y36336 | WO9931117-A1 | Cancer |
| HCEFL57 | Y36337 | WO9931117-A1 | Cancer |
| HETHE81 | Y36650 | WO9931117-A1 | Cancer |
| HTGAU75 | Y38386 | WO9935158-A1 | Immune/Hematopoietic |
| HTTDP47 | Y38387 | WO9935158-A1 | Cancer |
| HTXJQ11 | Y38388 | WO9935158-A1 | Cancer |
| HADCO45 | Y38389 | WO9935158-A1 | Cancer |
| HMIAL37 | Y38390 | WO9935158-A1 | Cancer |
| HNGDU40 | Y38391 | WO9935158-A1 | Immune/Hematopoietic |
| HFXBO84 | Y38392 | WO9935158-A1 | Neural/Sensory |
| HLLAX19 | Y38393 | WO9935158-A1 | Cancer |
| HPMAG94 | Y38394 | WO9935158-A1 | Cancer |
| HSVAK93 | Y38395 | WO9935158-A1 | Cancer |
| HMQBO88 | Y38396 | WO9935158-A1 | Cancer |
| HMQBU45 | Y38397 | WO9935158-A1 | Immune/Hematopoietic |
| HMWAJ53 | Y38398 | WO9935158-A1 | Immune/Hematopoietic |
| HCUGO12 | Y38401 | WO9935158-A1 | Digestive, |
| | | | Immune/Hematopoietic, |
| | | | Mixed Fetal |
| HPFCX44 | Y38402 | WO9935158-A1 | Cancer |
| HCUBV79 | Y38403 | WO9935158-A1 | Immune/Hematopoietic, |
| | | | Neural/Sensory |
| HLQBV04 | Y38404 | WO9935158-A1 | Cancer |
| HMADW66 | Y38405 | WO9935158-A1 | Cancer |
| HLDBE54 | Y38406 | WO9935158-A1 | Digestive, |
| | | | Reproductive |
| HFTAB66 | Y38407 | WO9935158-A1 | Digestive, |
| | | | Neural/Sensory |
| HEOMQ63 | Y38408 | WO9935158-A1 | Digestive, |
| | | | Immune/Hematopoietic |
| HDPJM30 | Y38409 | WO9935158-A1 | Immune/Hematopoietic, |
| | | | Neural/Sensory |
| HCFMG62 | Y38410 | WO9935158-A1 | Cancer |
| HJMAG88 | Y38411 | WO9935158-A1 | Cancer |
| HKAAH36 | Y38412 | WO9935158-A1 | Connective/Epithelial, |
| | | | Reproductive |
| HMADS41 | Y38413 | WO9935158-A1 | Cancer |
| HMEFT85 | Y38414 | WO9935158-A1 | Cancer |
| HMSBX80 | Y38415 | WO9935158-A1 | Immune/Hematopoietic, |
| | | | Reproductive |
| HNGCL23 | Y38416 | WO9935158-A1 | Immune/Hematopoietic |
| HPIBO15 | Y38418 | WO9935158-A1 | Cancer |
| HCYBG92 | Y38419 | WO9935158-A1 | Cancer |
| HMDAQ29 | Y38420 | WO9935158-A1 | Neural/Sensory, |
| | | | Reproductive |
| HSYBI49 | Y38421 | WO9935158-A1 | Cancer |
| HDTAB58 | Y38422 | WO9935158-A1 | Cancer |
| HFTAB66 | Y38423 | WO9935158-A1 | Digestive, |
| | | | Neural/Sensory |
| HDPBX23 | Y38424 | WO9935158-A1 | Immune/Hematopoietic, |
| | | | Neural/Sensory |
| HCFMG62 | Y38425 | WO9935158-A1 | Cancer |
| HKAAH36 | Y38426 | WO9935158-A1 | Connective/Epithelial, |
| | | | Reproductive |
| HKAAH36 | Y38427 | WO9935158-A1 | Connective/Epithelial, |
| | | | Reproductive |
| HMADS41 | Y38428 | WO9935158-A1 | Cancer |
| HNTBI26 | Y38429 | WO9935158-A1 | Cancer |
| HCYBI36 | Y38430 | WO9935158-A1 | Cancer |
| HTHBJ48 | Y41161 | US5981231-A | Digestive, |
| | | | Immune/Hematopoietic |
| HDQAC88 | Y41164 | US5981230-A | Cancer |
| HKGCR51 | Y41308 | WO9947540-A1 | Immune/Hematopoietic, |
| | | | Mixed Fetal, |
| | | | Neural/Sensory |
| HPMDK28 | Y41309 | WO9947540-A1 | Cancer |
| HLDCD04 | Y41310 | WO9947540-A1 | Cancer |
| HLDON23 | Y41311 | WO9947540-A1 | Cancer |
| HLDRM43 | Y41312 | WO9947540-A1 | Digestive, |
| | | | Reproductive |
| HLQAM28 | Y41313 | WO9947540-A1 | Digestive, |
| | | | Reproductive |
| HLTDE74 | Y41314 | WO9947540-A1 | Cancer |
| HLTFA64 | Y41315 | WO9947540-A1 | Cancer |
| HMCFY13 | Y41316 | WO9947540-A1 | Immune/Hematopoietic |
| HMMBD35 | Y41317 | WO9947540-A1 | Cancer |
| HMQCY03 | Y41318 | WO9947540-A1 | Digestive, |
| | | | Immune/Hematopoietic |
| HMSBX84 | Y41319 | WO9947540-A1 | Immune/Hematopoietic |
| HMSKI86 | Y41320 | WO9947540-A1 | Cancer |
| HMVBS81 | Y41321 | WO9947540-A1 | Cancer |
| HMWEB02 | Y41322 | WO9947540-A1 | Cancer |
| HMZAD77 | Y41323 | WO9947540-A1 | Cancer |
| HNFIY77 | Y41324 | WO9947540-A1 | Cancer |
| HNHEK85 | Y41325 | WO9947540-A1 | Immune/Hematopoietic, |
| | | | Mixed Fetal |
| HNHEU93 | Y41326 | WO9947540-A1 | Immune/Hematopoietic |
| HODAH74 | Y41327 | WO9947540-A1 | Connective/Epithelial, |
| | | | Reproductive, |
| | | | Respiratory |
| HODCU34 | Y41328 | WO9947540-A1 | Cancer |
| HODCZ09 | Y41329 | WO9947540-A1 | Reproductive |
| HISCF16 | Y41330 | WO9947540-A1 | Cancer |
| HOGAG15 | Y41331 | WO9947540-A1 | Cancer |
| HPIBO48 | Y41332 | WO9947540-A1 | Cancer |
| HPMFP40 | Y41333 | WO9947540-A1 | Reproductive |
| HPRCU95 | Y41334 | WO9947540-A1 | Musculoskeletal, |
| | | | Reproductive |
| HPTTG19 | Y41335 | WO9947540-A1 | Endocrine, |
| | | | Immune/Hematopoietic |
| HRDDV47 | Y41337 | WO9947540-A1 | Cancer |
| HRDEN56 | Y41338 | WO9947540-A1 | Musculoskeletal |
| HSFAN12 | Y41339 | WO9947540-A1 | Cardiovascular |
| HSQCM10 | Y41340 | WO9947540-A1 | Cancer |
| HSVAT68 | Y41341 | WO9947540-A1 | Excretory, |
| | | | Reproductive |
| HSXEC75 | Y41342 | WO9947540-A1 | Cancer |
| HTDAI54 | Y41343 | WO9947540-A1 | Cancer |
| HTEIT45 | Y41344 | WO9947540-A1 | Reproductive |
| HTGBE48 | Y41345 | WO9947540-A1 | Immune/Hematopoietic, |
| | | | Reproductive |
| HTLEP53 | Y41346 | WO9947540-A1 | Neural/Sensory, |
| | | | Reproductive |
| HTTBI76 | Y41347 | WO9947540-A1 | Cancer |
| HTWKG71 | Y41348 | WO9947540-A1 | Immune/Hematopoietic |
| HTXDN32 | Y41349 | WO9947540-A1 | Cancer |
| HTSGX80 | Y41350 | WO9947540-A1 | Cancer |
| HTXEY51 | Y41351 | WO9947540-A1 | Endocrine, |
| | | | Immune/Hematopoietic, |
| | | | Mixed Fetal |
| HTXFH55 | Y41352 | WO9947540-A1 | Cardiovascular, |
| | | | Immune/Hematopoietic |
| HTXJW17 | Y41353 | WO9947540-A1 | Digestive, |
| | | | Immune/Hematopoietic |
| HUFCJ30 | Y41354 | WO9947540-A1 | Cancer |
| HWAAP70 | Y41355 | WO9947540-A1 | Immune/Hematopoietic |
| HWABW49 | Y41356 | WO9947540-A1 | Immune/Hematopoietic |
| HWBDP28 | Y41357 | WO9947540-A1 | Cancer |
| HWDAC39 | Y41358 | WO9947540-A1 | Connective/Epithelial |
| HWHGQ49 | Y41359 | WO9947540-A1 | Cancer |
| HJPAD75 | Y41360 | WO9947540-A1 | Cancer |
| HLDRP33 | Y41361 | WO9947540-A1 | Digestive, |
| | | | Neural/Sensory |
| HMSIE02 | Y41362 | WO9947540-A1 | Cancer |
| HNGFE55 | Y41363 | WO9947540-A1 | Immune/Hematopoietic |
| HRAAJ19 | Y41365 | WO9947540-A1 | Cancer |
| HSAWV96 | Y41366 | WO9947540-A1 | Immune/Hematopoietic, |
| | | | Neural/Sensory |
| HSBBT37 | Y41367 | WO9947540-A1 | Cancer |
| HSDZR57 | Y41368 | WO9947540-A1 | Cancer |
| HCECQ07 | Y41369 | WO9947540-A1 | Cancer |
| HWBCP79 | Y41370 | WO9947540-A1 | Immune/Hematopoietic, |
| | | | Reproductive |
| HYAAL70 | Y41371 | WO9947540-A1 | Cancer |
| HYAAY86 | Y41372 | WO9947540-A1 | Immune/Hematopoietic |
| HAPBS03 | Y41373 | WO9947540-A1 | Cancer |
| HBJLC01 | Y41374 | WO9947540-A1 | Immune/Hematopoietic |
| HBLKD56 | Y41375 | WO9947540-A1 | Musculoskeletal |
| HCENK38 | Y41376 | WO9947540-A1 | Cancer |
| HE6GA29 | Y41379 | WO9947540-A1 | Mixed Fetal |
| HETHO95 | Y41381 | WO9947540-A1 | Digestive, |
| | | | Reproductive |
| HFCFJ18 | Y41382 | WO9947540-A1 | Cancer |
| HFPBM30 | Y41383 | WO9947540-A1 | Neural/Sensory |
| HFXKT05 | Y41384 | WO9947540-A1 | Cancer |
| HKB1E57 | Y41385 | WO9947540-A1 | Cancer |
| HLWAD77 | Y41386 | WO9947540-A1 | Cancer |
| HLWAY54 | Y41387 | WO9947540-A1 | Immune/Hematopoietic, |
| | | | Neural/Sensory, |
| | | | Reproductive |
| HNGBU28 | Y41388 | WO9947540-A1 | Immune/Hematopoietic |
| HOUHH51 | Y41389 | WO9947540-A1 | Cancer |
| HRAAB15 | Y41390 | WO9947540-A1 | Digestive, |
| | | | Excretory |
| HSAVH65 | Y41391 | WO9947540-A1 | Digestive, |
| | | | Immune/Hematopoietic, |
| | | | Reproductive |
| HSDGN55 | Y41392 | WO9947540-A1 | Cancer |
| HSXAH81 | Y41393 | WO9947540-A1 | Cancer |
| HSXBX80 | Y41394 | WO9947540-A1 | Cancer |
| HTEHV08 | Y41395 | WO9947540-A1 | Cancer |
| HUFAK67 | Y41396 | WO9947540-A1 | Digestive, |
| | | | Immune/Hematopoietic, |
| | | | Reproductive |
| HUSXS50 | Y41397 | WO9947540-A1 | Cancer |
| HAPON17 | Y41398 | WO9947540-A1 | Cancer |
| HATAC53 | Y41399 | WO9947540-A1 | Cancer |
| HAMFK58 | Y41400 | WO9947540-A1 | Cancer |
| HLYCH68 | Y41401 | WO9947540-A1 | Cancer |
| HCUHK65 | Y41402 | WO9947540-A1 | Cancer |
| HLDCD04 | Y41403 | WO9947540-A1 | Cancer |
| HOUHH51 | Y41404 | WO9947540-A1 | Cancer |
| HSLCQ82 | Y41571 | WO9947540-A1 | Cancer |
| HCGMD59 | Y45257 | WO9946289-A1 | Cancer |
| HCNSD76 | Y45258 | WO9946289-A1 | Digestive |
| HCNSD93 | Y45259 | WO9946289-A1 | Digestive |
| HCWBE22 | Y45260 | WO9946289-A1 | Immune/Hematopoietic, |
| | | | Neural/Sensory |
| HFEAN33 | Y45261 | WO9946289-A1 | Cancer |
| HCWUM50 | Y45262 | WO9946289-A1 | Cancer |
| HDHIA94 | Y45263 | WO9946289-A1 | Excretory, |
| | | | Neural/Sensory |
| HDPAE76 | Y45264 | WO9946289-A1 | Cancer |
| HDPIO54 | Y45265 | WO9946289-A1 | Immune/Hematopoietic, |
| | | | Reproductive |
| HDPNC61 | Y45266 | WO9946289-A1 | Cancer |
| HDPND46 | Y45267 | WO9946289-A1 | Immune/Hematopoietic |
| HDPSU13 | Y45268 | WO9946289-A1 | Immune/Hematopoietic |
| HDTGC73 | Y45269 | WO9946289-A1 | Cancer |
| HE2PD49 | Y45270 | WO9946289-A1 | Cancer |
| HEEAJ02 | Y45271 | WO9946289-A1 | Cancer |
| HELHD64 | Y45272 | WO9946289-A1 | Cancer |
| HEPAD91 | Y45273 | WO9946289-A1 | Digestive, |
| | | | Reproductive |
| HEQBH65 | Y45274 | WO9946289-A1 | Immune/Hematopoietic, |
| | | | Reproductive |
| HETCO02 | Y45275 | WO9946289-A1 | Cancer |
| HFAUO78 | Y45276 | WO9946289-A1 | Cancer |
| HFKEE48 | Y45277 | WO9946289-A1 | Cancer |
| HFKFG02 | Y45278 | WO9946289-A1 | Excretory, |
| | | | Immune/Hematopoietic, |
| | | | Neural/Sensory |
| H2CBN14 | Y45279 | WO9946289-A1 | Cancer |
| HHFFJ48 | Y45280 | WO9946289-A1 | Cardiovascular, |
| | | | Immune/Hematopoietic |
| HILCF66 | Y45281 | WO9946289-A1 | Cancer |
| HKABN45 | Y45282 | WO9946289-A1 | Cancer |
| HKDBK22 | Y45284 | WO9946289-A1 | Excretory |
| HKGAZ06 | Y45286 | WO9946289-A1 | Immune/Hematopoietic |
| HKGCK61 | Y45287 | WO9946289-A1 | Cancer |
| HFEAN33 | Y45288 | WO9946289-A1 | Cancer |
| HDHIA94 | Y45289 | WO9946289-A1 | Excretory, |
| | | | Neural/Sensory |
| HDPJO39 | Y52479 | WO9940184-A1 | Cancer |
| HNTCF82 | Y58185 | US6004780-A | Cardiovascular, |
| | | | Connective/Epithelial, |
| | | | Reproductive |
| HETAB62 | Y59285 | WO200004183-A1 | Cancer |
| HSYAE36 | Y59286 | WO200004183-A1 | Cancer |
| HKAPI15 | Y68800 | WO200005371-A1 | Connective/Epithelial |
| HUJCT9C | Y72090 | WO200068247-A2 | Cancer |
| HMGBM65 | Y72091 | WO200068247-A2 | Cancer |
| HATEE38 | Y72092 | WO200068247-A2 | Cancer |
| HCHAK72 | Y72093 | WO200068247-A2 | Cancer |
| HHFBJ67 | Y72094 | WO200068247-A2 | Cardiovascular, |
| | | | Neural/Sensory |
| HTTJK5C | Y72095 | WO200068247-A2 | Cancer |
| HWLGJ11 | Y72096 | WO200068247-A2 | Digestive |
| HTLEG15 | Y72097 | WO200068247-A2 | Cancer |
| HAGAS16 | Y72098 | WO200068247-A2 | Neural/Sensory |
| HATEE38 | Y72108 | WO200068247-A2 | Cancer |
| HKABZ65 | Y76124 | WO9958660-A1 | Connective/Epithelial |
| HNGIC80 | Y76125 | WO9958660-A1 | Immune/Hematopoietic |
| HDPUG50 | Y76126 | WO9958660-A1 | Cancer |
| HAEAB66 | Y76127 | WO9958660-A1 | Cancer |
| HHEPF59 | Y76128 | WO9958660-A1 | Cancer |
| HE9BK23 | Y76129 | WO9958660-A1 | Digestive, |
| | | | Mixed Fetal |
| HCYBI36 | Y76130 | WO9958660-A1 | Cancer |
| HSSDX51 | Y76131 | WO9958660-A1 | Cancer |
| HSDAJ46 | Y76132 | WO9958660-A1 | Cancer |
| HRACG45 | Y76133 | WO9958660-A1 | Cancer |
| HAPPW30 | Y76134 | WO9958660-A1 | Cancer |
| HE2ES51 | Y76135 | WO9958660-A1 | Cancer |
| HTXDW56 | Y76136 | WO9958660-A1 | Cancer |
| HDPKI93 | Y76138 | WO9958660-A1 | Cancer |
| HDLAC10 | Y76139 | WO9958660-A1 | Cancer |
| HDPOH06 | Y76140 | WO9958660-A1 | Cancer |
| HCE4G61 | Y76141 | WO9958660-A1 | Cancer |
| HCWUI13 | Y76142 | WO9958660-A1 | Immune/Hematopoietic |
| HDPSP01 | Y76143 | WO9958660-A1 | Cancer |
| HHPEN62 | Y76144 | WO9958660-A1 | Cancer |
| HUKBT29 | Y76145 | WO9958660-A1 | Cancer |
| HARAP48 | Y76146 | WO9958660-A1 | Cancer |
| HBIMB51 | Y76147 | WO9958660-A1 | Connective/Epithelial, |
| | | | Reproductive |
| HE8DX88 | Y76148 | WO9958660-A1 | Mixed Fetal |
| HNGHT03 | Y76149 | WO9958660-A1 | Immune/Hematopoietic |
| HWABU17 | Y76150 | WO9958660-A1 | Cancer |
| HCE5F84 | Y76151 | WO9958660-A1 | Cancer |
| HBXCD55 | Y76152 | WO9958660-A1 | Cancer |
| HOVCB25 | Y76153 | WO9958660-A1 | Reproductive |
| HSYAV66 | Y76154 | WO9958660-A1 | Digestive, |
| | | | Immune/Hematopoietic |
| HFPCT29 | Y76155 | WO9958660-A1 | Neural/Sensory |
| HAWAT25 | Y76156 | WO9958660-A1 | Cancer |
| HNHFR04 | Y76157 | WO9958660-A1 | Immune/Hematopoietic |
| HOSFT61 | Y76158 | WO9958660-A1 | Cancer |
| HBJIO81 | Y76159 | WO9958660-A1 | Immune/Hematopoietic |
| HADCL55 | Y76160 | WO9958660-A1 | Cancer |
| HAGGJ80 | Y76161 | WO9958660-A1 | Cancer |
| HAIBO81 | Y76162 | WO9958660-A1 | Neural/Sensory |
| HBBBC37 | Y76163 | WO9958660-A1 | Cancer |
| HBJMX85 | Y76164 | WO9958660-A1 | Cancer |
| HCEES66 | Y76165 | WO9958660-A1 | Digestive, |
| | | | Neural/Sensory |
| HCEMP62 | Y76166 | WO9958660-A1 | Cancer |
| HE2FB90 | Y76167 | WO9958660-A1 | Cancer |
| HE9DS56 | Y76168 | WO9958660-A1 | Cancer |
| HTOHJ89 | Y76169 | WO9958660-A1 | Immune/Hematopoietic |
| HASCE69 | Y76171 | WO9958660-A1 | Cancer |
| HHTLH52 | Y76172 | WO9958660-A1 | Neural/Sensory, |
| | | | Reproductive |
| HOUCT90 | Y76174 | WO9958660-A1 | Connective/Epithelial |
| HCFLR78 | Y76175 | WO9958660-A1 | Cancer |
| HTOHT18 | Y76176 | WO9958660-A1 | Cancer |
| HKPMB11 | Y76177 | WO9958660-A1 | Digestive, |
| | | | Excretory, |
| | | | Musculoskeletal |
| HNFHS38 | Y76178 | WO9958660-A1 | Cancer |
| HAIBU10 | Y76179 | WO9958660-A1 | Cancer |
| HAPOK30 | Y76180 | WO9958660-A1 | Cancer |
| HCWUA22 | Y76182 | WO9958660-A1 | Immune/Hematopoietic |
| HDSAG91 | Y76183 | WO9958660-A1 | Immune/Hematopoietic |
| HNEDJ35 | Y76184 | WO9958660-A1 | Immune/Hematopoietic, |
| | | | Reproductive |
| HTHBH29 | Y76185 | WO9958660-A1 | Immune/Hematopoietic, |
| | | | Mixed Fetal, |
| | | | Reproductive |
| H7TBA62 | Y76186 | WO9958660-A1 | Cancer |
| HNGIO50 | Y76187 | WO9958660-A1 | Immune/Hematopoietic |
| HMIAW81 | Y76188 | WO9958660-A1 | Immune/Hematopoietic, |
| | | | Neural/Sensory, |
| | | | Reproductive |
| HMMCJ60 | Y76189 | WO9958660-A1 | Immune/Hematopoietic, |
| | | | Musculoskeletal |
| HDPIO09 | Y76190 | WO9958660-A1 | Cancer |
| HHFHH34 | Y76191 | WO9958660-A1 | Cardiovascular |
| HISCL83 | Y76192 | WO9958660-A1 | Digestive |
| HTOAI70 | Y76193 | WO9958660-A1 | Immune/Hematopoietic |
| HSDER95 | Y76194 | WO9958660-A1 | Digestive, |
| | | | Neural/Sensory |
| HNECL25 | Y76195 | WO9958660-A1 | Immune/Hematopoietic |
| HNFGZ45 | Y76196 | WO9958660-A1 | Cardiovascular, |
| | | | Digestive, |
| | | | Immune/Hematopoietic |
| HHGCU49 | Y76197 | WO9958660-A1 | Cancer |
| HETDT81 | Y76199 | WO9958660-A1 | Digestive, |
| | | | Immune/Hematopoietic, |
| | | | Reproductive |
| HHLBA14 | Y76200 | WO9958660-A1 | Cancer |
| HLTBU43 | Y76201 | WO9958660-A1 | Immune/Hematopoietic |
| HNTSJ84 | Y76202 | WO9958660-A1 | Cancer |
| HOHCG16 | Y76203 | WO9958660-A1 | Digestive, |
| | | | Musculoskeletal |
| HTHCB31 | Y76204 | WO9958660-A1 | Immune/Hematopoietic, |
| | | | Mixed Fetal, |
| | | | Neural/Sensory |
| HUKAM16 | Y76205 | WO9958660-A1 | Cancer |
| HLDOJ66 | Y76206 | WO9958660-A1 | Digestive |
| HTXKF10 | Y76207 | WO9958660-A1 | Immune/Hematopoietic |
| HPMAI22 | Y76208 | WO9958660-A1 | Reproductive |
| HL2AG57 | Y76209 | WO9958660-A1 | Cancer |
| HUSAM59 | Y76210 | WO9958660-A1 | Cancer |
| HNGGR26 | Y76211 | WO9958660-A1 | Immune/Hematopoietic |
| HTLCX30 | Y76212 | WO9958660-A1 | Reproductive |
| HCEBC87 | Y76213 | WO9958660-A1 | Cancer |
| HATCB92 | Y76214 | WO9958660-A1 | Endocrine |
| HLHAL68 | Y76216 | WO9958660-A1 | Respiratory |
| HEOMR73 | Y76217 | WO9958660-A1 | Immune/Hematopoietic |
| HETIB83 | Y76218 | WO9958660-A1 | Cancer |
| HJPDD28 | Y76219 | WO9958660-A1 | Cancer |
| HBAMB15 | Y76220 | WO9958660-A1 | Cardiovascular, |
| | | | Excretory, |
| | | | Reproductive |
| HBAFQ33 | Y76221 | WO9958660-A1 | Cancer |
| HTOAI70 | Y76222 | WO9958660-A1 | Immune/Hematopoietic |
| HJPDD28 | Y76223 | WO9958660-A1 | Cancer |
| HRACG45 | Y76266 | WO9958660-A1 | Cancer |
| HBXCD55 | Y76303 | WO9958660-A1 | Cancer |
| HOSFT61 | Y76325 | WO9958660-A1 | Cancer |
| HWBBP10 | Y86215 | WO9966041-A1 | Immune/Hematopoietic, |
| | | | Neural/Sensory |
| HWBDO80 | Y86216 | WO9966041-A1 | Immune/Hematopoietic, |
| | | | Musculoskeletal, |
| | | | Reproductive |
| HWHGU54 | Y86217 | WO9966041-A1 | Connective/Epithelial |
| HYACI76 | Y86218 | WO9966041-A1 | Cancer |
| HBHMA23 | Y86219 | WO9966041-A1 | Cancer |
| HCE3G20 | Y86220 | WO9966041-A1 | Cancer |
| HCEJP80 | Y86221 | WO9966041-A1 | Cardiovascular, |
| | | | Neural/Sensory |
| HCUDD24 | Y86222 | WO9966041-A1 | Digestive, |
| | | | Immune/Hematopoietic, |
| | | | Reproductive |
| HDPTD15 | Y86223 | WO9966041-A1 | Immune/Hematopoietic |
| HDPWU34 | Y86224 | WO9966041-A1 | Cancer |
| HEOOV79 | Y86225 | WO9966041-A1 | Cancer |
| HFKET93 | Y86226 | WO9966041-A1 | Excretory, |
| | | | Immune/Hematopoietic, |
| | | | Neural/Sensory |
| HFTDL56 | Y86227 | WO9966041-A1 | Cancer |
| HFXJX44 | Y86228 | WO9966041-A1 | Cancer |
| HKACU58 | Y86229 | WO9966041-A1 | Cancer |
| HKFBC53 | Y86230 | WO9966041-A1 | Cancer |
| HLTHR66 | Y86231 | WO9966041-A1 | Cancer |
| HLYBA69 | Y86232 | WO9966041-A1 | Cancer |
| HNTMX29 | Y86233 | WO9966041-A1 | Cancer |
| HNTNC20 | Y86234 | WO9966041-A1 | Cancer |
| HNTNI01 | Y86235 | WO9966041-A1 | Cancer |
| HPIBW65 | Y86236 | WO9966041-A1 | Cancer |
| HSMBE69 | Y86237 | WO9966041-A1 | Cancer |
| HT4FW61 | Y86238 | WO9966041-A1 | Connective/Epithelial, |
| | | | Immune/Hematopoietic, |
| | | | Reproductive |
| HYABK95 | Y86239 | WO9966041-A1 | Cancer |
| HYACE88 | Y86240 | WO9966041-A1 | Cancer |
| HOABR60 | Y86241 | WO9966041-A1 | Cancer |
| HAPOM45 | Y86243 | WO9966041-A1 | Cardiovascular, |
| | | | Digestive |
| HCEJQ69 | Y86244 | WO9966041-A1 | Cancer |
| HAGFI62 | Y86245 | WO9966041-A1 | Cancer |
| HAGGS43 | Y86246 | WO9966041-A1 | Neural/Sensory |
| HBJHP03 | Y86247 | WO9966041-A1 | Immune/Hematopoietic, |
| | | | Reproductive |
| HCHPF68 | Y86248 | WO9966041-A1 | Reproductive |
| HDPJF37 | Y86249 | WO9966041-A1 | Cancer |
| HSDEZ20 | Y86250 | WO9966041-A1 | Neural/Sensory |
| HTEKU58 | Y86251 | WO9966041-A1 | Cancer |
| HLTBL58 | Y86252 | WO9966041-A1 | Immune/Hematopoietic, |
| | | | Musculoskeletal, |
| | | | Neural/Sensory |
| HPWDJ42 | Y86253 | WO9966041-A1 | Digestive, |
| | | | Reproductive |
| HRACD15 | Y86254 | WO9966041-A1 | Cancer |
| HSIAC80 | Y86255 | WO9966041-A1 | Cancer |
| HAGFD18 | Y86256 | WO9966041-A1 | Cancer |
| HAJAP76 | Y86257 | WO9966041-A1 | Cancer |
| HDTGC86 | Y86258 | WO9966041-A1 | Digestive, |
| | | | Immune/Heinatopoietic, |
| | | | Reproductive |
| HAGDI35 | Y86259 | WO9966041-A1 | Cancer |
| HELHN47 | Y86260 | WO9966041-A1 | Cancer |
| HPRBC80 | Y86261 | WO9966041-A1 | Cancer |
| HAQAR23 | Y86262 | WO9966041-A1 | Cancer |
| HAIFL18 | Y86263 | WO9966041-A1 | Digestive, |
| | | | Immune/Hematopoietic |
| HJPAY76 | Y86264 | WO9966041-A1 | Cancer |
| HUSXE77 | Y86265 | WO9966041-A1 | Cancer |
| HUFEF62 | Y86266 | WO9966041-A1 | Digestive |
| HTWJK32 | Y86267 | WO9966041-A1 | Cancer |
| HTWDF76 | Y86268 | WO9966041-A1 | Immune/Hematopoietic |
| HTPBN68 | Y86269 | WO9966041-A1 | Digestive |
| HTOIY21 | Y86270 | WO9966041-A1 | Immune/Hematopoietic |
| HTLDD53 | Y86271 | WO9966041-A1 | Connective/Epithelial, |
| | | | Digestive, |
| | | | Reproductive |
| HTLFG05 | Y86272 | WO9966041-A1 | Cancer |
| HDPXR23 | Y86273 | WO9966041-A1 | Digestive, |
| | | | Immune/Hematopoietic |
| HSIAC45 | Y86274 | WO9966041-A1 | Digestive, |
| | | | Immune/Hematopoietic |
| HSRGW16 | Y86275 | WO9966041-A1 | Cancer |
| HSSJC35 | Y86276 | WO9966041-A1 | Cancer |
| HTEAX23 | Y86277 | WO9966041-A1 | Reproductive |
| HTGCH22 | Y86278 | WO9966041-A1 | Immune/Hematopoietic, |
| | | | Mixed Fetal, |
| | | | Reproductive |
| HTJMA95 | Y86279 | WO9966041-A1 | Cancer |
| HHEAA08 | Y86280 | WO9966041-A1 | Immune/Hematopoietic |
| HBQAA49 | Y86281 | WO9966041-A1 | Neural/Sensory |
| HDPBI32 | Y86282 | WO9966041-A1 | Excretory, |
| | | | Immune/Hematopoietic, |
| | | | Neural/Sensory |
| HBIBF16 | Y86283 | WO9966041-A1 | Neural/Sensory |
| HBCAY05 | Y86284 | WO9966041-A1 | Cancer |
| HCUCK44 | Y86285 | WO9966041-A1 | Cancer |
| HCE2W56 | Y86286 | WO9966041-A1 | Cancer |
| HCWAG01 | Y86287 | WO9966041-A1 | Immune/Hematopoietic |
| HDRMI82 | Y86289 | WO9966041-A1 | Cancer |
| HEPCU48 | Y86290 | WO9966041-A1 | Cancer |
| HDPRK33 | Y86291 | WO9966041-A1 | Immune/Hematopoietic, |
| | | | Mixed Fetal |
| HKGAX42 | Y86292 | WO9966041-A1 | Digestive, |
| | | | Immune/Hematopoietic, |
| | | | Reproductive |
| HLMAZ95 | Y86293 | WO9966041-A1 | Cancer |
| HLMFC07 | Y86294 | WO9966041-A1 | Digestive, |
| | | | Immune/Hematopoietic |
| HL2AG87 | Y86295 | WO9966041-A1 | Immune/Hematopoietic, |
| | | | Neural/Sensory, |
| | | | Reproductive |
| HKGCO27 | Y86296 | WO9966041-A1 | Cancer |
| HLDCE79 | Y86297 | WO9966041-A1 | Digestive |
| HERAD40 | Y86298 | WO9966041-A1 | Connective/Epithelial |
| HFOXB55 | Y86299 | WO9966041-A1 | Cancer |
| HFVGZ42 | Y86300 | WO9966041-A1 | Cancer |
| HNHAF39 | Y86301 | WO9966041-A1 | Immune/Hematopoietic |
| HNTSW57 | Y86302 | WO9966041-A1 | Cancer |
| HOGCK20 | Y86303 | WO9966041-A1 | Cancer |
| HLYES38 | Y86305 | WO9966041-A1 | Immune/Hematopoietic, |
| | | | Reproductive |
| HMECK83 | Y86306 | WO9966041-A1 | Cardiovascular |
| HMQAG66 | Y86308 | WO9966041-A1 | Immune/Hematopoietic |
| HWBBP10 | Y86309 | WO9966041-A1 | Immune/Hematopoietic, |
| | | | Neural/Sensory |
| HAPAK52 | Y86310 | WO9966041-A1 | Cancer |
| HDPWU34 | Y86311 | WO9966041-A1 | Cancer |
| HKACU58 | Y86312 | WO9966041-A1 | Cancer |
| HLDBQ19 | Y86314 | WO9966041-A1 | Cancer |
| HNTMX29 | Y86315 | WO9966041-A1 | Cancer |
| HOABR60 | Y86316 | WO9966041-A1 | Cancer |
| HPWDJ42 | Y86317 | WO9966041-A1 | Digestive, |
| | | | Reproductive |
| HPWDJ42 | Y86318 | WO9966041-A1 | Digestive, |
| | | | Reproductive |
| HRACD15 | Y86319 | WO9966041-A1 | Cancer |
| HPRBC80 | Y86320 | WO9966041-A1 | Cancer |
| HUFEF62 | Y86321 | WO9966041-A1 | Digestive |
| HTLFG05 | Y86322 | WO9966041-A1 | Cancer |
| HDPXR23 | Y86323 | WO9966041-A1 | Digestive, |
| | | | Immune/Hematopoietic |
| HSRGW16 | Y86324 | WO9966041-A1 | Cancer |
| HDPBI32 | Y86327 | WO9966041-A1 | Excretory, |
| | | | Immune/Hematopoietic, |
| | | | Neural/Sensory |
| HDRMI82 | Y86328 | WO9966041-A1 | Cancer |
| HKGCO27 | Y86330 | WO9966041-A1 | Cancer |
| HNTSW57 | Y86332 | WO9966041-A1 | Cancer |
| HOGCK20 | Y86333 | WO9966041-A1 | Cancer |
| HNTMX29 | Y86388 | WO9966041-A1 | Cancer |
| HPRBC80 | Y86463 | WO9966041-A1 | Cancer |
| HTLFG05 | Y86488 | WO9966041-A1 | Cancer |
| HDPXR23 | Y86489 | WO9966041-A1 | Digestive, |
| | | | Immune/Hematopoietic |
| HSRGW16 | Y86496 | WO9966041-A1 | Cancer |
| HDRMI82 | Y86532 | WO9966041-A1 | Cancer |
| HNTSW57 | Y86571 | WO9966041-A1 | Cancer |
| HISCN02 | Y87064 | WO200004140-A1 | Digestive |
| HHGDM70 | Y87065 | WO200004140-A1 | Immune/Hematopoietic |
| HHPGO40 | Y87066 | WO200004140-A1 | Cancer |
| HAMGG68 | Y87067 | WO200004140-A1 | Cancer |
| HAPOM49 | Y87068 | WO200004140-A1 | Cancer |
| HBGBA69 | Y87069 | WO200004140-A1 | Cancer |
| HBJFJ26 | Y87070 | WO200004140-A1 | Cancer |
| HCEDH38 | Y87071 | WO200004140-A1 | Mixed Fetal, |
| | | | Neural/Sensory |
| HDPOJ08 | Y87072 | WO200004140-A1 | Cancer |
| HDPRX82 | Y87073 | WO200004140-A1 | Cancer |
| HELGK31 | Y87074 | WO200004140-A1 | Cancer |
| HFPCX64 | Y87075 | WO200004140-A1 | Mixed Fetal, |
| | | | Neural/Sensory |
| HFXDO60 | Y87076 | WO200004140-A1 | Neural/Sensory |
| HAUAI83 | Y87077 | WO200004140-A1 | Reproductive |
| HKGAH42 | Y87078 | WO200004140-A1 | Neural/Sensory |
| HMIAP86 | Y87079 | WO200004140-A1 | Cancer |
| HMUAP70 | Y87080 | WO200004140-A1 | Cancer |
| HRACJ35 | Y87081 | WO200004140-A1 | Cancer |
| HTWDE26 | Y87082 | WO200004140-A1 | Cancer |
| HBGBB44 | Y87083 | WO200004140-A1 | Cancer |
| HBAFA02 | Y87084 | WO200004140-A1 | Cancer |
| H2CBT75 | Y87085 | WO200004140-A1 | Cancer |
| HAGDQ42 | Y87086 | WO200004140-A1 | Cancer |
| HBMCJ42 | Y87087 | WO200004140-A1 | Immune/Hematopoietic, |
| | | | Reproductive |
| HLCDA16 | Y87089 | WO200004140-A1 | Cancer |
| HELHL48 | Y87090 | WO200004140-A1 | Cancer |
| HISAQ04 | Y87091 | WO200004140-A1 | Digestive, |
| | | | Neural/Sensory, |
| | | | Reproductive |
| HJACB89 | Y87092 | WO200004140-A1 | Cancer |
| HTECC05 | Y87093 | WO200004140-A1 | Cancer |
| HBJLF01 | Y87094 | WO200004140-A1 | Cancer |
| HBXGP60 | Y87095 | WO200004140-A1 | Cancer |
| HCE5B20 | Y87096 | WO200004140-A1 | Mixed Fetal, |
| | | | Neural/Sensory |
| HCMSQ56 | Y87097 | WO200004140-A1 | Cancer |
| HCNAH57 | Y87098 | WO200004140-A1 | Digestive |
| HCUEP91 | Y87099 | WO200004140-A1 | Immune/Hematopoietic |
| HDPCJ91 | Y87100 | WO200004140-A1 | Cancer |
| HDPGK25 | Y87101 | WO200004140-A1 | Cancer |
| HE2DY70 | Y87102 | WO200004140-A1 | Immune/Hematopoietic, |
| | | | Mixed Fetal, |
| | | | Musculoskeletal |
| HE2NV57 | Y87103 | WO200004140-A1 | Cancer |
| HETBR16 | Y87104 | WO200004140-A1 | Digestive, |
| | | | Immune/Hematopoietic, |
| | | | Reproductive |
| HFXDG13 | Y87105 | WO200004140-A1 | Cancer |
| HFXKY27 | Y87106 | WO200004140-A1 | Neural/Sensory |
| HHPEC09 | Y87107 | WO200004140-A1 | Cancer |
| HISAD54 | Y87108 | WO200004140-A1 | Cancer |
| HJBCY35 | Y87109 | WO200004140-A1 | Cancer |
| HKAEA19 | Y87110 | WO200004140-A1 | Cancer |
| HKGDL36 | Y87111 | WO200004140-A1 | Cancer |
| HLDBS43 | Y87112 | WO200004140-A1 | Cancer |
| HLWAD92 | Y87113 | WO200004140-A1 | Cancer |
| HLYBI15 | Y87114 | WO200004140-A1 | Immune/Hematopoietic |
| HMEJE05 | Y87115 | WO200004140-A1 | Cancer |
| HNGIX55 | Y87116 | WO200004140-A1 | Immune/Hematopoietic |
| HNHEX30 | Y87117 | WO200004140-A1 | Immune/Hematopoietic |
| HPJBI33 | Y87118 | WO200004140-A1 | Reproductive |
| HRABA80 | Y87119 | WO200004140-A1 | Excretory |
| HRACD80 | Y87120 | WO200004140-A1 | Excretory, |
| | | | Reproductive |
| HSLCX03 | Y87121 | WO200004140-A1 | Cancer |
| HT5GJ57 | Y87122 | WO200004140-A1 | Cancer |
| HTACS42 | Y87123 | WO200004140-A1 | Cancer |
| HTEKE40 | Y87124 | WO200004140-A1 | Cancer |
| HTOBX69 | Y87125 | WO200004140-A1 | Cancer |
| HUVEO77 | Y87126 | WO200004140-A1 | Reproductive |
| H2CBG48 | Y87127 | WO200004140-A1 | Cancer |
| H2CBU83 | Y87128 | WO200004140-A1 | Cancer |
| HAPNY94 | Y87129 | WO200004140-A1 | Cancer |
| HBJHZ58 | Y87130 | WO200004140-A1 | Immune/Hematopoietic, |
| | | | Reproductive |
| HCE2B33 | Y87131 | WO200004140-A1 | Cancer |
| HDPBQ02 | Y87132 | WO200004140-A1 | Immune/Hematopoietic |
| HFIYI70 | Y87133 | WO200004140-A1 | Cancer |
| HDPOZ56 | Y87134 | WO200004140-A1 | Cancer |
| HAPOM49 | Y87136 | WO200004140-A1 | Cancer |
| HBJFJ26 | Y87137 | WO200004140-A1 | Cancer |
| HCNUA40 | Y87138 | WO200004140-A1 | Cancer |
| HCEBW71 | Y87139 | WO200004140-A1 | Mixed Fetal, |
| | | | Neural/Sensory |
| HCEBW71 | Y87140 | WO200004140-A1 | Mixed Fetal, |
| | | | Neural/Sensory |
| HAUAI83 | Y87141 | WO200004140-A1 | Reproductive |
| HFLQB16 | Y87143 | WO200004140-A1 | Cancer |
| HAGFY16 | Y87144 | WO200004140-A1 | Cancer |
| HFLQB16 | Y87146 | WO200004140-A1 | Cancer |
| HAGFY16 | Y87147 | WO200004140-A1 | Cancer |
| HMHBN40 | Y87149 | WO200004140-A1 | Cancer |
| HDPBQ71 | Y87150 | WO200004140-A1 | Cancer |
| HSKCT36 | Y87151 | WO200004140-A1 | Cancer |
| HRACD80 | Y87152 | WO200004140-A1 | Excretory, |
| | | | Reproductive |
| HSLCX03 | Y87153 | WO200004140-A1 | Cancer |
| H2CBU83 | Y87154 | WO200004140-A1 | Cancer |
| HFLQB16 | Y87180 | WO200004140-A1 | Cancer |
| HAGFY16 | Y87181 | WO200004140-A1 | Cancer |
| HFLQB16 | Y87183 | WO200004140-A1 | Cancer |
| HAGFY16 | Y87184 | WO200004140-A1 | Cancer |
| HMHBN40 | Y87187 | WO200004140-A1 | Cancer |
| HDPBQ71 | Y87188 | WO200004140-A1 | Cancer |
| HSKCT36 | Y87192 | WO200004140-A1 | Cancer |
| HRACD80 | Y87205 | WO200004140-A1 | Excretory, |
| | | | Reproductive |
| HSLCX03 | Y87208 | WO200004140-A1 | Cancer |
| H2CBU83 | Y87215 | WO200004140-A1 | Cancer |
| HISCH47 | Y87784 | US6054289-A | Cancer |
| HADCD24 | Y87789 | US6054289-A | Cancer |
| HDTEA84 | Y90357 | WO200052028-A1 | Cancer |
| HKGCN17 | Y91346 | WO200011014-A1 | Immune/Hematopoietic, |
| | | | Neural/Sensory, |
| | | | Reproductive |
| HETAD68 | Y91347 | WO200011014-A1 | Cancer |
| HPIAT78 | Y91348 | WO200011014-A1 | Cancer |
| HHFHG52 | Y91349 | WO200011014-A1 | Cancer |
| HDTAB58 | Y91350 | WO200011014-A1 | Cancer |
| HEOMQ62 | Y91351 | WO200011014-A1 | Cancer |
| HWLJQ88 | Y91352 | WO200011014-A1 | Digestive |
| HMICP03 | Y91353 | WO200011014-A1 | Cancer |
| HAJAB01 | Y91354 | WO200011014-A1 | Cancer |
| HE2AT09 | Y91355 | WO200011014-A1 | Cancer |
| HSDJA15 | Y91356 | WO200011014-A1 | Cancer |
| HAMGW29 | Y91357 | WO200011014-A1 | Cancer |
| HAPSR85 | Y91358 | WO200011014-A1 | Digestive, |
| | | | Endocrine |
| HTOHD42 | Y91359 | WO200011014-A1 | Immune/Hematopoietic |
| HWLIH65 | Y91360 | WO200011014-A1 | Cancer |
| HTOJA73 | Y91361 | WO200011014-A1 | Immune/Hematopoietic |
| HPMGJ45 | Y91362 | WO200011014-A1 | Cancer |
| HFVIC62 | Y91363 | WO200011014-A1 | Digestive, |
| | | | Immune/Hematopoietic, |
| | | | Reproductive |
| HHENW77 | Y91364 | WO200011014-A1 | Cancer |
| HMSIV91 | Y91365 | WO200011014-A1 | Cancer |
| HMSKC04 | Y91366 | WO200011014-A1 | Immune/Hematopoietic |
| HSAZG33 | Y91367 | WO200011014-A1 | Immune/Hematopoietic |
| HTEBC92 | Y91368 | WO200011014-A1 | Cancer |
| HTXEL29 | Y91369 | WO200011014-A1 | Immune/Hematopoietic |
| HDPAW44 | Y91370 | WO200011014-A1 | Cancer |
| HMACS20 | Y91371 | WO200011014-A1 | Cancer |
| HAJAY88 | Y91372 | WO200011014-A1 | Immune/Hematopoietic |
| HBOEG69 | Y91373 | WO200011014-A1 | Cancer |
| HWLEQ37 | Y91374 | WO200011014-A1 | Cancer |
| HE9CS37 | Y91375 | WO200011014-A1 | Cancer |
| HNGEI34 | Y91376 | WO200011014-A1 | Immune/Hematopoietic |
| HTOAT76 | Y91377 | WO200011014-A1 | Excretory, |
| | | | Immune/Hematopoietic |
| HDPVH60 | Y91378 | WO200011014-A1 | Cancer |
| HLYCR65 | Y91379 | WO200011014-A1 | Cancer |
| HARAY91 | Y91380 | WO200011014-A1 | Immune/Hematopoietic, |
| | | | Mixed Fetal, |
| | | | Neural/Sensory |
| HCHNT03 | Y91381 | WO200011014-A1 | Digestive, |
| | | | Reproductive |
| HCUBW95 | Y91382 | WO200011014-A1 | Immune/Hematopoietic, |
| | | | Neural/Sensory |
| HDPLV95 | Y91383 | WO200011014-A1 | Immune/Hematopoietic, |
| | | | Reproductive |
| HEMGB12 | Y91384 | WO200011014-A1 | Cancer |
| HHENP27 | Y91385 | WO200011014-A1 | Cancer |
| HSPBF70 | Y91386 | WO200011014-A1 | Cancer |
| HTXKB57 | Y91387 | WO200011014-A1 | Cancer |
| HUKAA55 | Y91388 | WO200011014-A1 | Digestive, |
| | | | Immune/Hematopoietic, |
| | | | Reproductive |
| HFXGT58 | Y91389 | WO200011014-A1 | Neural/Sensory |
| HUSFF19 | Y91391 | WO200011014-A1 | Cancer |
| HUVDJ43 | Y91393 | WO200011014-A1 | Cardiovascular, |
| | | | Reproductive |
| HTLCU49 | Y91394 | WO200011014-A1 | Cancer |
| HDTAB58 | Y91395 | WO200011014-A1 | Cancer |
| HWLJQ88 | Y91396 | WO200011014-A1 | Digestive |
| HUVDJ43 | Y91399 | WO200011014-A1 | Cardiovascular, |
| | | | Reproductive |
| HUVDJ43 | Y91400 | WO200011014-A1 | Cardiovascular, |
| | | | Reproductive |
| HTLCU49 | Y91401 | WO200011014-A1 | Cancer |
| HUVDJ43 | Y91446 | WO200011014-A1 | Cardiovascular, |
| | | | Reproductive |
| HUVDJ43 | Y91448 | WO200011014-A1 | Cardiovascular, |
| | | | Reproductive |
| HFKIB49 | Y91449 | WO200011014-A1 | Cancer |
| HDPTK41 | Y91451 | WO200006698-A1 | Cancer |
| HFXGT26 | Y91452 | WO200006698-A1 | Cancer |
| HLTGX30 | Y91453 | WO200006698-A1 | Immune/Hematopoietic |
| HLTHG37 | Y91454 | WO200006698-A1 | Cancer |
| HNTMZ90 | Y91455 | WO200006698-A1 | Digestive, |
| | | | Reproductive |
| HPIBX03 | Y91456 | WO200006698-A1 | Cancer |
| H6EDY30 | Y91457 | WO200006698-A1 | Cancer |
| HAMGR28 | Y91458 | WO200006698-A1 | Cancer |
| HAPNZ94 | Y91459 | WO200006698-A1 | Cancer |
| HATCP77 | Y91460 | WO200006698-A1 | Cancer |
| HDABR72 | Y91461 | WO200006698-A1 | Cancer |
| HDPKB18 | Y91462 | WO200006698-A1 | Immune/Hematopoietic |
| HEQCC55 | Y91463 | WO200006698-A1 | Cancer |
| HETDE26 | Y91464 | WO200006698-A1 | Cancer |
| HOEDH84 | Y91465 | WO200006698-A1 | Cancer |
| HPIBT55 | Y91466 | WO200006698-A1 | Cancer |
| HSLCS05 | Y91467 | WO200006698-A1 | Cancer |
| HDPDD03 | Y91468 | WO200006698-A1 | Cancer |
| HDTDQ23 | Y91470 | WO200006698-A1 | Cancer |
| HE2PY40 | Y91471 | WO200006698-A1 | Mixed Fetal |
| HEONM66 | Y91472 | WO200006698-A1 | Immune/Hematopoietic |
| HKAEG43 | Y91473 | WO200006698-A1 | Cancer |
| HLHDP65 | Y91474 | WO200006698-A1 | Cancer |
| HLMDO03 | Y91475 | WO200006698-A1 | Cancer |
| HMAGK93 | Y91476 | WO200006698-A1 | Cancer |
| HMEAL02 | Y91477 | WO200006698-A1 | Cardiovascular |
| HMKCH52 | Y91478 | WO200006698-A1 | Neural/Sensory |
| HCEFB69 | Y91479 | WO200006698-A1 | Cancer |
| HKADM92 | Y91480 | WO200006698-A1 | Cancer |
| HSPMG77 | Y91481 | WO200006698-A1 | Digestive |
| HSQAC69 | Y91482 | WO200006698-A1 | Cancer |
| HSTBJ86 | Y91483 | WO200006698-A1 | Connective/Epithelial |
| HUVDJ43 | Y91485 | WO200006698-A1 | Cardiovascular, |
| | | | Reproductive |
| HADCP14 | Y91486 | WO200006698-A1 | Connective/Epithelial |
| HBXCF95 | Y91487 | WO200006698-A1 | Cancer |
| HEQBU15 | Y91488 | WO200006698-A1 | Cancer |
| HL1BD22 | Y91489 | WO200006698-A1 | Cancer |
| HOEEU24 | Y91490 | WO200006698-A1 | Cancer |
| HTTBR96 | Y91491 | WO200006698-A1 | Reproductive |
| HWHQS55 | Y91492 | WO200006698-A1 | Cancer |
| HCEEK50 | Y91493 | WO200006698-A1 | Cancer |
| HCWBU94 | Y91494 | WO200006698-A1 | Immune/Hematopoietic |
| HE2NR62 | Y91495 | WO200006698-A1 | Cancer |
| HHSGH19 | Y91496 | WO200006698-A1 | Neural/Sensory |
| HDPGT01 | Y91497 | WO200006698-A1 | Cancer |
| HOHCA35 | Y91499 | WO200006698-A1 | Cancer |
| HPMGP24 | Y91500 | WO200006698-A1 | Mixed Fetal, |
| | | | Reproductive |
| HSDIE16 | Y91501 | WO200006698-A1 | Neural/Sensory |
| HSOBK48 | Y91502 | WO200006698-A1 | Digestive |
| HTADH39 | Y91503 | WO200006698-A1 | Cancer |
| HUSGT36 | Y91504 | WO200006698-A1 | Cardiovascular |
| HVAAE95 | Y91505 | WO200006698-A1 | Digestive |
| HHEAH25 | Y91506 | WO200006698-A1 | Cancer |
| HBJIY92 | Y91507 | WO200006698-A1 | Cancer |
| HCLCW50 | Y91508 | WO200006698-A1 | Respiratory |
| HDRMF68 | Y91509 | WO200006698-A1 | Digestive, |
| | | | Respiratory |
| HOUGG12 | Y91510 | WO200006698-A1 | Cancer |
| HEEAQ11 | Y91511 | WO200006698-A1 | Reproductive |
| HEEAZ65 | Y91512 | WO200006698-A1 | Musculoskeletal, |
| | | | Reproductive |
| HEGAN94 | Y91513 | WO200006698-A1 | Reproductive |
| HFXBL33 | Y91514 | WO200006698-A1 | Cancer |
| HLIBD68 | Y91515 | WO200006698-A1 | Cancer |
| HLTCO33 | Y91516 | WO200006698-A1 | Immune/Hematopoietic, |
| | | | Neural/Sensory, |
| | | | Reproductive |
| HLYAC95 | Y91517 | WO200006698-A1 | Immune/Hematopoietic |
| HNHKS18 | Y91519 | WO200006698-A1 | Immune/Hematopoietic |
| HSLJW78 | Y91520 | WO200006698-A1 | Musculoskeletal |
| HHFHD01 | Y91521 | WO200006698-A1 | Cardiovascular, |
| | | | Musculoskeletal, |
| | | | Neural/Sensory |
| HLWAE11 | Y91522 | WO200006698-A1 | Cancer |
| HCYBN55 | Y91523 | WO200006698-A1 | Cancer |
| HEONX38 | Y91524 | WO200006698-A1 | Cancer |
| HLDQU79 | Y91525 | WO200006698-A1 | Cancer |
| HSYBK21 | Y91526 | WO200006698-A1 | Cancer |
| HTHDS25 | Y91528 | WO200006698-A1 | Endocrine, |
| | | | Immune/Hematopoietic |
| HFIHO70 | Y91529 | WO200006698-A1 | Cancer |
| HPMEI86 | Y91530 | WO200006698-A1 | Cancer |
| HSOBV29 | Y91531 | WO200006698-A1 | Cancer |
| HWABY10 | Y91532 | WO200006698-A1 | Cancer |
| HACCI17 | Y91533 | WO200006698-A1 | Cancer |
| HAPQT22 | Y91534 | WO200006698-A1 | Immune/Hematopoietic |
| HDPBO81 | Y91535 | WO200006698-A1 | Digestive, |
| | | | Immune/Hematopoietic, |
| | | | Reproductive |
| HDPGI49 | Y91536 | WO200006698-A1 | Cancer |
| HDTBV77 | Y91537 | WO200006698-A1 | Cancer |
| HFIUE82 | Y91538 | WO200006698-A1 | Cancer |
| HHEND31 | Y91539 | WO200006698-A1 | Cancer |
| HKMND01 | Y91540 | WO200006698-A1 | Excretory |
| HLDBI84 | Y91541 | WO200006698-A1 | Cancer |
| HLTEK17 | Y91542 | WO200006698-A1 | Cancer |
| HEBEJ18 | Y91543 | WO200006698-A1 | Cancer |
| HMEAI48 | Y91544 | WO200006698-A1 | Cardiovascular |
| HNHGN91 | Y91545 | WO200006698-A1 | Digestive, |
| | | | Endocrine |
| | | | Immune/Hematopoietic |
| HODAE92 | Y91546 | WO200006698-A1 | Cancer |
| HODDF13 | Y91547 | WO200006698-A1 | Reproductive |
| HATEF60 | Y91548 | WO200006698-A1 | Cancer |
| HLTHG37 | Y91549 | WO200006698-A1 | Cancer |
| HAMGR28 | Y91550 | WO200006698-A1 | Cancer |
| HDPKB18 | Y91551 | WO200006698-A1 | Immune/Hematopoietic |
| HEQCC55 | Y91552 | WO200006698-A1 | Cancer |
| HEONM66 | Y91554 | WO200006698-A1 | Immune/Hematopoietic |
| HKAEG43 | Y91555 | WO200006698-A1 | Cancer |
| HLHDP65 | Y91556 | WO200006698-A1 | Cancer |
| HOEEU24 | Y91557 | WO200006698-A1 | Cancer |
| HHEAH25 | Y91558 | WO200006698-A1 | Cancer |
| HCYBN55 | Y91559 | WO200006698-A1 | Cancer |
| HEONX38 | Y91560 | WO200006698-A1 | Cancer |
| HFIHO70 | Y91561 | WO200006698-A1 | Cancer |
| HACCI17 | Y91562 | WO200006698-A1 | Cancer |
| HDPBO81 | Y91563 | WO200006698-A1 | Digestive, |
| | | | Immune/Hematopoietic, |
| | | | Reproductive |
| HAMGR28 | Y91599 | WO200006698-A1 | Cancer |
| HDPKB18 | Y91603 | WO200006698-A1 | Immune/Hematopoietic |
| HEQCC55 | Y91604 | WO200006698-A1 | Cancer |
| HLHDP65 | Y91631 | WO200006698-A1 | Cancer |
| HOEEU24 | Y91643 | WO200006698-A1 | Cancer |
| HHEAH25 | Y91647 | WO200006698-A1 | Cancer |
| HHEAH25 | Y91648 | WO200006698-A1 | Cancer |
| HLIBD68 | Y91656 | WO200006698-A1 | Cancer |
| HCYBN55 | Y91670 | WO200006698-A1 | Cancer |
| HEONX38 | Y91672 | WO200006698-A1 | Cancer |
| HFIHO70 | Y91679 | WO200006698-A1 | Cancer |
| HMKBA64 | Y91681 | WO200006698-A1 | Cancer |
| HACCI17 | Y91683 | WO200006698-A1 | Cancer |
| HMKEA94 | Y93650 | WO200036105-A1 | Cancer |
| HE9SF68 | Y93973 | WO200042189-A1 | Cancer |
| HTSGS30 | Y93974 | WO200042189-A1 | Digestive, |
| | | | Immune/Hematopoietic, |
| | | | Mixed Fetal |
| HDQAC88 | Y95534 | WO200040726-A1 | Cancer |
| HDPMM34 | Y96280 | WO200028035-A1 | Cancer |
| HKABZ65 | Y96962 | WO200039327-A1 | Connective/Epithelial |
| HWHGB15 | Y96963 | WO200039327-A1 | Connective/Epithelial |
| HCDDP40 | Y96964 | WO200039327-A1 | Immune/Hematopoietic, |
| | | | Musculoskeletal |
| HETBE01 | B03767 | US6066724-A | Cancer |
| HETGI70 | B03768 | US6066724-A | Cancer |
| HETDK42 | B03769 | US6066724-A | Cancer |
| HTEMZ33 | B07705 | WO200043493-A2 | Cancer |
| HE8AW20 | B07941 | US6103871-A | Cancer |
| HNEDU15 | B08659 | WO200050597-A2 | Cancer |
| HLTBT71 | B08661 | WO200050597-A2 | Cancer |
| HBICD95 | B08785 | WO200050620-A2 | Cancer |
| HE9CC44 | B08786 | US6110893-A | Cancer |
| HPRCC57 | B10293 | US6077692-A | Cancer |
| HPRCC57 | B10304 | US6077692-A | Cancer |
| HPRCC57 | B10310 | US6077692-A | Cancer |
| HPRCC57 | B10311 | US6077692-A | Cancer |
| HPRCC57 | B10312 | US6077692-A | Cancer |
| HPRCC57 | B10313 | US6077692-A | Cancer |
| HPRCC57 | B10316 | US6077692-A | Cancer |
| HPRCC57 | B10320 | US6077692-A | Cancer |
| HILBX90 | B11125 | US6133422-A | Cancer |
| HCQAS17 | B12900 | US6080722-A | Digestive, |
| | | | Mixed Fetal, |
| | | | Reproductive |
| HBMSE33 | B15366 | WO200042165-A2 | Cancer |
| HE2BG16 | B15413 | US6090575-A | Cancer |
| HT4CC72 | B18618 | WO200053223-A1 | Immune/Hematopoietic |
| HAPOR40 | B18750 | WO200055204-A1 | Cancer |
| HTSGS30 | B18755 | WO200055204-A1 | Digestive, |
| | | | Immune/Hematopoietic, |
| | | | Mixed Fetal |
| HFGAM58 | B18803 | WO200053210-A1 | Cancer |
| HSDFB55 | B19550 | WO200053793-A1 | Cancer |
| HUVEO91 | B19863 | WO200066608-A1 | Cancer |
| HCDDP40 | B25583 | WO200029435-A1 | Immune/Hematopoietic, |
| | | | Musculoskeletal |
| HMELK96 | B26981 | WO200056862-A1 | Cancer |
| HMELK96 | B26987 | WO200056862-A1 | Cancer |
| HTTBN61 | B26990 | WO200056862-A1 | Cancer |
| HCUDS60 | B26991 | WO200056862-A1 | Cancer |
| HLYBX88 | B26992 | WO200056862-A1 | Cancer |
| HILBI36 | B28524 | US6130051-A | Cancer |
| HLYBX88 | B29790 | WO200066156-A1 | Cancer |
| HCEMP60 | B29923 | US6130061-A | Cancer |
| HE8AE45 | B33821 | WO200056753-A1 | Cancer |
| HE2OA95 | B33822 | WO200056753-A1 | Cancer |
| HJACE54 | B35705 | WO200063221-A2 | Cancer |
| HTTBN61 | B36265 | WO200064465-A1 | Cancer |
| HPRCB54 | B36696 | WO200071150-A1 | Cancer |
| HSDME38 | B39392 | WO200057903-A2 | Cancer |
| HSDME38 | B39393 | WO200057903-A2 | Cancer |
| HPDDY64 | B43604 | WO200055350-A1 | Cancer |
| HPABA51 | B44685 | WO200058339-A2 | Cancer |
| HPMSM24 | B45376 | WO200061628-A1 | Cancer |
| HOUCQ17 | B50002 | WO200071577-A1 | Cancer |
| HODAH63 | B50272 | WO200071567-A2 | Neural/Sensory, |
| | | | Reproductive |
| HODAH63 | B50282 | WO200071567-A2 | Neural/Sensory, |
| | | | Reproductive |
| HODAH63 | B50283 | WO200071567-A2 | Neural/Sensory, |
| | | | Reproductive |
| HCEGY95 | B50289 | WO200071582-A1 | Immune/Hematopoietic, |
| | | | Mixed Fetal, |
| | | | Neural/Sensory |
| HE9CC44 | B50293 | WO200071715-A1 | Cancer |
| HAGAT55 | B50294 | WO200071715-A1 | Cancer |
| HAGAT55 | B50704 | WO200071152-A1 | Cancer |
| HKABO35 | B50892 | WO200073321-A1 | Cancer |
| HETJY78 | B51152 | US6153739-A | Cancer |
| HPRCC57 | B58248 | WO200055180-A2 | Cancer |
| HHFCU19 | B58276 | WO200055180-A2 | Cancer |
| HNFAG09 | B58319 | WO200055180-A2 | Cancer |
| HBZSD43 | B58925 | WO200055173-A1 | Cancer |
| HHFHJ57 | B58970 | WO200055173-A1 | Cancer |
| HPRCC57 | B60201 | WO200072872-A1 | Cancer |
| HPRCC57 | B60204 | WO200072872-A1 | Cancer |
| HPRCC57 | B60206 | WO200072872-A1 | Cancer |
| HPRCC57 | B60207 | WO200072872-A1 | Cancer |
| HPRCC57 | B60208 | WO200072872-A1 | Cancer |
| HPRCC57 | B60209 | WO200072872-A1 | Cancer |
| HPRCC57 | B60210 | WO200072872-A1 | Cancer |
| HPRCC57 | B60212 | WO200072872-A1 | Cancer |
| HPRCC57 | B60214 | WO200072872-A1 | Cancer |
| HRGBQ38 | B64643 | WO200077197-A1 | Cancer |
| HRGBQ38 | B64644 | WO200077197-A1 | Cancer |
| HRGBQ38 | B64645 | WO200077197-A1 | Cancer |
| HRGBQ38 | B64646 | WO200077197-A1 | Cancer |
| HLTBT71 | B64873 | WO200077256-A1 | Cancer |
| HTEIX55 | B64953 | WO200076530-A1 | Cancer |
| HPABA51 | R75085 | ZA9403789-A | Cancer |
| HAPAT57 | R76127 | WO9517092-A | Cancer |
| HWFBD68 | R76128 | WO9517092-A | Cancer |
| HMPSA79 | R77649 | WO9532282-A1 | Cancer |
| HGBAB73 | R79008 | WO9520678-A1 | Cancer |
| HLTAW73 | R79009 | WO9520678-A1 | Cancer |
| HFCAW19 | R80095 | WO9527781-A1 | Cancer |
| HHFBT80 | R80575 | WO9524474-A1 | Cancer |
| HFKCU96 | R81309 | WO9519985-A1 | Cancer |
| HSRAW34 | R81461 | WO9605226-A1 | Cancer |
| HOSBD47 | R82686 | WO9524473-A1 | Cancer |
| HOSBH74 | R82720 | WO9524182-A1 | Cancer |
| HE8AE45 | R82987 | WO9524466-A1 | Cancer |
| HLFBE10 | R84522 | WO9524411-A1 | Cancer |
| HAGAT55 | R85650 | WO9524414-A1 | Cancer |
| HIBEC52 | R87954 | WO9530428-A1 | Cancer |
| HTEAH87 | R88390 | WO9531539-A1 | Cancer |
| HFBEH64 | R88405 | WO9531538-A1 | Cancer |
| HAFAK86 | R88419 | WO9535372-A1 | Cancer |
| HASSB35 | R88452 | WO9600242-A1 | Cancer |
| HPAAA47 | R88481 | WO9601270-A1 | Cancer |
| HJPAH22 | R90703 | WO9600297-A1 | Cancer |
| HIBCL76 | R90764 | WO9603415-A1 | Cancer |
| HIBEJ89 | R90765 | WO9603415-A1 | Neural/Sensory |
| HLFBE49 | R90919 | WO9601896-A | Cancer |
| HIBCL22 | R90989 | WO9605225-A1 | Cancer |
| HSSAW84 | R91929 | WO9612791-A1 | Cancer |
| HSNME29 | R92220 | WO9604928-A1 | Cancer |
| HSNME29 | R92753 | WO9605221-A | Cancer |
| HGBAN46 | R93086 | WO9605856-A1 | Cancer |
| HE9DR66 | R93087 | WO9605856-A1 | Cancer |
| HTPAN40 | R93118 | WO9606862-A | Cancer |
| HILBI36 | R93156 | WO9608557-A1 | Cancer |
| HJBAQ29 | R94350 | WO9609311-A1 | Cancer |
| HASAC73 | R94601 | WO9611259-A1 | Cancer |
| HPLAP22 | R94602 | WO9611259-A1 | Cancer |
| HT2SA16 | R95634 | WO9614394-A1 | Cancer |
| HLHAC42 | R95692 | WO9615806-A1 | Cancer |
| HE2CA82 | R95830 | WO9613603-A1 | Cancer |
| HTOBA30 | R95831 | WO9613603-A1 | Cancer |
| HFSBE16 | R97222 | WO9616087-A1 | Cancer |
| HHFCU19 | R97565 | WO9621736-A1 | Cancer |
| HE8AW20 | R97739 | WO9615222-A1 | Cancer |
| HSBBC75 | R97978 | WO9615147-A1 | Cancer |
| HLFBG09 | R98224 | WO9612501-A1 | Cancer |
| HHPEC49 | R98261 | WO9611946-A1 | Cancer |
| HFGAM58 | R98265 | WO9618725-A1 | Cancer |
| HUVCT01 | R98994 | WO9617931-A1 | Cancer |
| HFSAG79 | R99329 | WO9624668-A1 | Cancer |
| HATBG78 | R99353 | WO9627009-A1 | Endocrine |
| HUVEO91 | R99453 | WO9614328-A1 | Cancer |
| HPRCC57 | W00176 | WO9625422-A1 | Cancer |
| HCAAA02 | W00482 | WO9621724-A1 | Cancer |
| HETAN67 | W01097 | WO9629401-A1 | Cancer |
| HSSNB01 | W01098 | WO9629401-A1 | Cancer |
| HETJY78 | W01619 | WO9635778-A1 | Cancer |
| HPRAJ70 | W01730 | WO9639435-A1 | Cancer |
| HNFAG09 | W02151 | WO9625432-A1 | Cancer |
| HFSBC65 | W02613 | WO9618730-A1 | Cancer |
| HE2BG16 | W04247 | WO9630406-A1 | Cancer |
| HTECE68 | W05295 | WO9630524-A1 | Cancer |
| HRGBQ38 | W05313 | WO9623410-A1 | Cancer |
| HFCCE09 | W05314 | WO9623410-A1 | Cancer |
| HGOCA18 | W05315 | WO9623410-A1 | Cancer |
| HT1SB52 | W05809 | WO9634095-A1 | Cancer |
| HFGAN72 | W06124 | WO9634877-A1 | Cancer |
| HHFBT80 | W06539 | WO9639431-A1 | Cancer |
| HCNAY46 | W06545 | WO9639419-A1 | Cancer |
| HCQDM23 | W06546 | WO9639419-A1 | Digestive, |
| | | | Reproductive |
| HCNUB65 | W06548 | WO9639419-A1 | Cancer |
| HCNSE58 | W06550 | WO9639419-A1 | Cancer |
| HCNBB33 | W06551 | WO9639419-A1 | Cancer |
| HKLSA58 | W06552 | WO9639419-A1 | Cancer |
| HCNSD13 | W06553 | WO9639419-A1 | Cancer |
| HLQBI14 | W06575 | WO9639520-A1 | Cancer |
| HAECD08 | W07202 | WO9634891-A1 | Cancer |
| HWFBD68 | W07203 | WO9634891-A1 | Cancer |
| HAPAT57 | W07204 | WO9634891-A1 | Cancer |
| HDGNR10 | W07602 | WO9639437-A1 | Digestive, |
| | | | Immune/Hematopoietic, |
| | | | Reproductive |
| HMSDB49 | W07604 | WO9639521-A1 | Immune/Hematopoietic, |
| | | | Reproductive |
| HFSAG79 | W07605 | WO9639522-A1 | Cancer |
| HTOEX74 | W07606 | WO9639522-A1 | Cancer |
| HMWCF06 | W07611 | WO9639421-A1 | Cancer |
| HIBEB69 | W07617 | WO9639438-A1 | Cancer |
| HGBER32 | W07618 | WO9639434-A1 | Digestive |
| HETGQ23 | W07619 | WO9639436-A1 | Cancer |
| HE2OA95 | W07663 | WO9636709-A1 | Cancer |
| HCEGY95 | W08079 | WO9639506-A1 | Immune/Hematopoietic, |
| | | | Mixed Fetal, |
| | | | Neural/Sensory |
| HIBEF51 | W08101 | WO9639441-A1 | Neural/Sensory |
| HTNAD29 | W08141 | WO9639442-A1 | Cancer |
| HE9CC44 | W08142 | WO9639507-A1 | Cancer |
| HDGRC02 | W09110 | WO9639440-A1 | Cancer |
| HPTTT24 | W09111 | WO9639420-A1 | Digestive, |
| | | | Endocrine |
| HUVDR03 | W09404 | WO9639485-A1 | Cancer |
| HPBCB95 | W09405 | WO9639158-A1 | Cancer |
| HE9NG77 | W09408 | WO9639486-A1 | Cancer |
| HATCK89 | W09432 | WO9639509-A1 | Cancer |
| HTOEX74 | W10574 | WO9624668-A1 | Cancer |
| HOSBD47 | W11478 | WO9639515-A1 | Cancer |
| HCQAS17 | W12691 | WO9639541-A1 | Digestive, |
| | | | Mixed Fetal, |
| | | | Reproductive |
| HCACU62 | W12692 | WO9639424-A1 | Cancer |
| HAQBM60 | W12693 | WO9639418-A1 | Connective/Epithelial, |
| | | | Immune/Hematopoietic, |
| | | | Reproductive |
| HLTDG74 | W12695 | WO9639433-A1 | Immune/Hematopoietic |
| HODAH63 | W12696 | WO9639508-A1 | Neural/Sensory, |
| | | | Reproductive |
| HSSAW84 | W17043 | US5618717-A | Cancer |
| HHSAN40 | W17838 | WO9717358-A1 | Cancer |
| HTPBS22 | W19632 | WO9722623-A1 | Cancer |
| HSATU68 | W19780 | WO9725340-A1 | Cancer |
| HFCBS02 | W22408 | WO9711970-A1 | Cancer |
| HGBAN46 | W22669 | WO9731098-A1 | Cancer |
| HE9DR66 | W22670 | WO9731098-A1 | Cancer |
| HE9DR66 | W22671 | WO9731098-A1 | Cancer |
| HE9DR66 | W22672 | WO9731098-A1 | Cancer |
| HE9DR66 | W22673 | WO9731098-A1 | Cancer |
| HE9DR66 | W22674 | WO9731098-A1 | Cancer |
| HE9DR66 | W22675 | WO9731098-A1 | Cancer |
| HPMSM24 | W22732 | WO9724929-A1 | Cancer |
| HPABA51 | W22882 | US5635616-A | Cancer |
| HESAJ20 | W23663 | WO9729189-A1 | Cancer |
| HALTA54 | W24137 | WO9723640-A1 | Cancer |
| HCEMP60 | W24847 | WO9718224-A1 | Cancer |
| HFCCE09 | W25112 | US5650313-A | Cancer |
| HGOCA18 | W25113 | US5650313-A | Cancer |
| HRGBQ38 | W25114 | US5650313-A | Cancer |
| HTPAN40 | W26464 | US5654172-A | Cancer |
| HTECD31 | W27087 | WO9725349-A1 | Cancer |
| HLHDC84 | W27118 | WO9725338-A1 | Cancer |
| HTPAN08 | W27134 | WO9733899-A1 | Cancer |
| HFKET35 | W27152 | WO9734013-A1 | Cancer |
| HTTER36 | W27224 | WO9735870-A1 | Cardiovascular, |
| | | | Connective/Epithelial, |
| | | | Reproductive |
| HTOBH93 | W27561 | WO9727747-A1 | Cancer |
| HE6BK61 | W29291 | WO9735010-A1 | Cancer |
| HE6BK61 | W29292 | WO9735010-A1 | Cancer |
| HTOJK64 | W30193 | WO9735976-A2 | Cancer |
| HLMBA70 | W30891 | WO9735028-A1 | Immune/Hematopoietic, |
| | | | Mixed Fetal, |
| | | | Reproductive |
| HMEIP65 | W31512 | WO9732993-A1 | Cancer |
| HTTBN61 | W31517 | WO9733904-A1 | Cancer |
| HFLQA68 | W31527 | WO9737022-A1 | Cancer |
| HE8AW20 | W31692 | US5695980-A | Cancer |
| HTXEI33 | W31759 | WO9733898-A1 | Cancer |
| HCUDE60 | W31902 | WO9737021-A1 | Cancer |
| HCABA58 | W32110 | WO9738012-A1 | Cancer |
| HMEAN51 | W32112 | WO9734998-A1 | Cancer |
| HT4CC72 | W32255 | WO9734911-A1 | Immune/Hematopoietic |
| HCUDE60 | W32323 | WO9736915-A1 | Cancer |
| HSAAU35 | W33603 | WO9747742-A1 | Connective/Epithelial, |
| | | | Musculoskeletal, |
| | | | Reproductive |
| HETBE01 | W35802 | WO9734997-A1 | Cancer |
| HETGI70 | W35803 | WO9734997-A1 | Cancer |
| HETDK42 | W35804 | WO9734997-A1 | Cancer |
| HBJEL88 | W35904 | WO9738003-A1 | Cancer |
| HSHCL68 | W36449 | WO9735027-A1 | Cancer |
| HLTBT71 | W37002 | WO9733902-A1 | Cancer |
| HPDDO12 | W37003 | WO9733902-A1 | Cancer |
| HHPEC49 | W37799 | US5750370-A | Cancer |
| HCQAJ72 | W37844 | WO9807749-A1 | Cancer |
| HMECG71 | W37845 | WO9807749-A1 | Cancer |
| HSIEH63 | W37846 | WO9807749-A1 | Digestive |
| HBICD95 | W37847 | WO9807880-A1 | Cancer |
| HMQBM23 | W37935 | WO9808870-A1 | Cancer |
| HOEBG39 | W37946 | WO9821236-A1 | Cancer |
| HOSBH74 | W39216 | EP812916-A2 | Cancer |
| HOSBH74 | W39264 | EP812916-A2 | Cancer |
| HOSBH74 | W39265 | EP812916-A2 | Cancer |
| HOSBH74 | W39266 | EP812916-A2 | Cancer |
| HOSBH74 | W39267 | EP812916-A2 | Cancer |
| HOSBH74 | W39268 | EP812916-A2 | Cancer |
| HODAH63 | W40077 | US5728546-A | Neural/Sensory, |
| | | | Reproductive |
| HFBEH64 | W41362 | US5723311-A | Cancer |
| HSAAU35 | W41502 | EP812913-A2 | Connective/Epithelial, |
| | | | Musculoskeletal, |
| | | | Reproductive |
| HSAAU35 | W41520 | WO9747741-A1 | Connective/Epithelial, |
| | | | Musculoskeletal, |
| | | | Reproductive |
| HOSBH74 | W41645 | WO9747642-A1 | Cancer |
| HTSEX82 | W41938 | WO9748807-A1 | Digestive, |
| | | | Immune/Hematopoietic |
| HIBCL76 | W42995 | US5710019-A | Cancer |
| HIBEJ89 | W42996 | US5710019-A | Neural/Sensory |
| HILBI36 | W46518 | US5716806-A | Cancer |
| HCNAY46 | W46876 | US5733748-A | Cancer |
| HCQDM23 | W46877 | US5733748-A | Digestive, |
| | | | Reproductive |
| HCNUB65 | W46879 | US5733748-A | Cancer |
| HCNSE58 | W46882 | US5733748-A | Cancer |
| HCNBB33 | W46883 | US5733748-A | Cancer |
| HKLSA58 | W46884 | US5733748-A | Cancer |
| HCNSD13 | W46885 | US5733748-A | Cancer |
| HEMEM90 | W48334 | WO9807881-A1 | Cancer |
| HE9BK24 | W48335 | WO9807754-A1 | Cancer |
| HPASD50 | W48391 | WO9807735-A1 | Cancer |
| HETAN67 | W48762 | WO9812204-A1 | Cancer |
| HHFHJ57 | W49032 | WO9825957-A2 | Cancer |
| HGBER32 | W49807 | US5776729-A | Digestive |
| HATCK89 | W49826 | US5773252-A | Cancer |
| HCEPR64 | W51244 | WO9821242-A1 | Cancer |
| HPRCC57 | W52581 | WO9806844-A1 | Cancer |
| HPRCC57 | W52582 | WO9806844-A1 | Cancer |
| HPRCC57 | W52583 | WO9806844-A1 | Cancer |
| HPRCC57 | W52584 | WO9806844-A1 | Cancer |
| HPRCC57 | W52585 | WO9806844-A1 | Cancer |
| HPRCC57 | W52586 | WO9806844-A1 | Cancer |
| HPRCC57 | W52587 | WO9806844-A1 | Cancer |
| HPRCC57 | W52588 | WO9806844-A1 | Cancer |
| HPRCC57 | W52590 | WO9806844-A1 | Cancer |
| HPRCC57 | W52591 | WO9806844-A1 | Cancer |
| HPRCC57 | W52592 | WO9806844-A1 | Cancer |
| HPRCC57 | W52593 | WO9806844-A1 | Cancer |
| HPRCC57 | W52594 | WO9806844-A1 | Cancer |
| HPRCC57 | W52595 | WO9806844-A1 | Cancer |
| HPRCC57 | W52596 | WO9806844-A1 | Cancer |
| HPRCC57 | W52597 | WO9806844-A1 | Cancer |
| HPRCC57 | W52598 | WO9806844-A1 | Cancer |
| HPRCC57 | W52599 | WO9806844-A1 | Cancer |
| HDQMB53 | W52842 | WO9807862-A2 | Cancer |
| HWFBD68 | W52843 | WO9807862-A2 | Cancer |
| HPMFW51 | W53121 | WO9806859-A1 | Cancer |
| HPMFW51 | W53122 | WO9806859-A1 | Cancer |
| HPRCC57 | W53787 | WO9806844-A1 | Cancer |
| HPRCC57 | W53792 | WO9806844-A1 | Cancer |
| HPRCC57 | W53793 | WO9806844-A1 | Cancer |
| HMEEJ22 | W53897 | WO9808969-A1 | Cancer |
| HE9CC44 | W54036 | US5763214-A | Cancer |
| HMQCD14 | W55884 | WO9806733-A1 | Cancer |
| HUVDE75 | W56249 | WO9806839-A1 | Cancer |
| HCNBB33 | W56503 | WO9815624-A1 | Cancer |
| HTPBR22 | W56504 | WO9815624-A1 | Cancer |
| HETAS87 | W56505 | WO9815624-A1 | Cancer |
| HETAS87 | W56506 | WO9815624-A1 | Cancer |
| HPRAJ70 | W56641 | US5756309-A | Cancer |
| HAICL46 | W57044 | WO9811138-A1 | Cancer |
| HAECD08 | W57688 | WO9814582-A1 | Cancer |
| HAECD08 | W57691 | WO9814582-A1 | Cancer |
| HAECD08 | W57692 | WO9814582-A1 | Cancer |
| HAECD08 | W57693 | WO9814582-A1 | Cancer |
| HAECD08 | W57694 | WO9814582-A1 | Cancer |
| HAECD08 | W57695 | WO9814582-A1 | Cancer |
| HWFBD68 | W57697 | WO9814582-A1 | Cancer |
| HAPAT57 | W57698 | WO9814582-A1 | Cancer |
| HAECD08 | W57699 | WO9814582-A1 | Cancer |
| HAECD08 | W57701 | WO9814582-A1 | Cancer |
| HMSDB49 | W57881 | WO9824908-A1 | Immune/Hematopoietic, |
| | | | Reproductive |
| HNEDU15 | W58391 | WO9818921-A1 | Cancer |
| HE9NG77 | W58704 | US5780263-A | Cancer |
| HFSAG79 | W58900 | WO9814477-A1 | Cancer |
| HTOEX74 | W58901 | WO9814477-A1 | Cancer |
| HTOEX74 | W58902 | WO9814477-A1 | Cancer |
| HTOEX74 | W58903 | WO9814477-A1 | Cancer |
| HTOEX74 | W58904 | WO9814477-A1 | Cancer |
| HTOEX74 | W58905 | WO9814477-A1 | Cancer |
| HTOEX74 | W58906 | WO9814477-A1 | Cancer |
| HTOEX74 | W58907 | WO9814477-A1 | Cancer |
| HTOEX74 | W58908 | WO9814477-A1 | Cancer |
| HTOEX74 | W58909 | WO9814477-A1 | Cancer |
| HTOEX74 | W58910 | WO9814477-A1 | Cancer |
| HTOEX74 | W58911 | WO9814477-A1 | Cancer |
| HTOEX74 | W58912 | WO9814477-A1 | Cancer |
| HTOEX74 | W58913 | WO9814477-A1 | Cancer |
| HTOEX74 | W58914 | WO9814477-A1 | Cancer |
| HTOEX74 | W58915 | WO9814477-A1 | Cancer |
| HTOEX74 | W58916 | WO9814477-A1 | Cancer |
| HTOEX74 | W58917 | WO9814477-A1 | Cancer |
| HTOEX74 | W58918 | WO9814477-A1 | Cancer |
| HTOEX74 | W58919 | WO9814477-A1 | Cancer |
| HTOEX74 | W58920 | WO9814477-A1 | Cancer |
| HTOEX74 | W58921 | WO9814477-A1 | Cancer |
| HTOEX74 | W58922 | WO9814477-A1 | Cancer |
| HTOEX74 | W58923 | WO9814477-A1 | Cancer |
| HTOEX74 | W58924 | WO9814477-A1 | Cancer |
| HTOEX74 | W58925 | WO9814477-A1 | Cancer |
| HTOEX74 | W58926 | WO9814477-A1 | Cancer |
| HTOEX74 | W58927 | WO9814477-A1 | Cancer |
| HTOEX74 | W58928 | WO9814477-A1 | Cancer |
| HTOEX74 | W58929 | WO9814477-A1 | Cancer |
| HTOEX74 | W58930 | WO9814477-A1 | Cancer |
| HTOEX74 | W58931 | WO9814477-A1 | Cancer |
| HTOEX74 | W58932 | WO9814477-A1 | Cancer |
| HTOEX74 | W58933 | WO9814477-A1 | Cancer |
| HTOEX74 | W58934 | WO9814477-A1 | Cancer |
| HTOEX74 | W58935 | WO9814477-A1 | Cancer |
| HTOEX74 | W58936 | WO9814477-A1 | Cancer |
| HTOEX74 | W58937 | WO9814477-A1 | Cancer |
| HTOEX74 | W58938 | WO9814477-A1 | Cancer |
| HTOEX74 | W58939 | WO9814477-A1 | Cancer |
| HTOEX74 | W58940 | WO9814477-A1 | Cancer |
| HTOEX74 | W58941 | WO9814477-A1 | Cancer |
| HFSAG79 | W58942 | WO9814477-A1 | Cancer |
| HFSAG79 | W58943 | WO9814477-A1 | Cancer |
| HFSAG79 | W58944 | WO9814477-A1 | Cancer |
| HFSAG79 | W58945 | WO9814477-A1 | Cancer |
| HFSAG79 | W58946 | WO9814477-A1 | Cancer |
| HFSAG79 | W58947 | WO9814477-A1 | Cancer |
| HFSAG79 | W58948 | WO9814477-A1 | Cancer |
| HFSAG79 | W58949 | WO9814477-A1 | Cancer |
| HFSAG79 | W58950 | WO9814477-A1 | Cancer |
| HFSAG79 | W58951 | WO9814477-A1 | Cancer |
| HFSAG79 | W58952 | WO9814477-A1 | Cancer |
| HFSAG79 | W58953 | WO9814477-A1 | Cancer |
| HFSAG79 | W58954 | WO9814477-A1 | Cancer |
| HFSAG79 | W58955 | WO9814477-A1 | Cancer |
| HFSAG79 | W58956 | WO9814477-A1 | Cancer |
| HFSAG79 | W58957 | WO9814477-A1 | Cancer |
| HFSAG79 | W58958 | WO9814477-A1 | Cancer |
| HFSAG79 | W58959 | WO9814477-A1 | Cancer |
| HFSAG79 | W58960 | WO9814477-A1 | Cancer |
| HFSAG79 | W58961 | WO9814477-A1 | Cancer |
| HFSAG79 | W58962 | WO9814477-A1 | Cancer |
| HFSAG79 | W58963 | WO9814477-A1 | Cancer |
| HFSAG79 | W58964 | WO9814477-A1 | Cancer |
| HFSAG79 | W58965 | WO9814477-A1 | Cancer |
| HFSAG79 | W58966 | WO9814477-A1 | Cancer |
| HFSAG79 | W58967 | WO9814477-A1 | Cancer |
| HFSAG79 | W58968 | WO9814477-A1 | Cancer |
| HFSAG79 | W58969 | WO9814477-A1 | Cancer |
| HFSAG79 | W58970 | WO9814477-A1 | Cancer |
| HFSAG79 | W58971 | WO9814477-A1 | Cancer |
| HFSAG79 | W58972 | WO9814477-A1 | Cancer |
| HFSAG79 | W58973 | WO9814477-A1 | Cancer |
| HFSAG79 | W58974 | WO9814477-A1 | Cancer |
| HFSAG79 | W58975 | WO9814477-A1 | Cancer |
| HCEGH45 | W59666 | WO9824900-A1 | Immune/Hematopoietic, |
| | | | Mixed Fetal, |
| | | | Neural/Sensory |
| HHFCU19 | W59753 | US5786193-A | Cancer |
| HLMBP36 | W59872 | WO9831792-A1 | Cancer |
| HEMFI85 | W59873 | WO9831800-A2 | Cancer |
| HTXET53 | W59874 | WO9831800-A2 | Cancer |
| HBZAK03 | W59876 | WO9831800-A2 | Cancer |
| HLFBD44 | W59877 | WO9831800-A2 | Cancer |
| HEBGM49 | W59878 | WO9831800-A2 | Cancer |
| HNGBH54 | W59879 | WO9831800-A2 | Cancer |
| HSAAL25 | W59880 | WO9831800-A2 | Cancer |
| HSXCK41 | W59882 | WO9831800-A2 | Cancer |
| HFKFY79 | W59883 | WO9831800-A2 | Cancer |
| HAICH28 | W59884 | WO9831800-A2 | Cancer |
| HT1SB52 | W60045 | WO9818824-A1 | Cancer |
| HSDFB55 | W60054 | WO9816643-A1 | Cancer |
| HEBBC23 | W60607 | WO9820110-A1 | Immune/Hematopoietic, |
| | | | Musculoskeletal, |
| | | | Neural/Sensory |
| HTPBS22 | W61600 | WO9831798-A1 | Cancer |
| HMACR70 | W61616 | WO9831799-A2 | Cancer |
| HTEDK48 | W61617 | WO9831799-A2 | Cancer |
| HTPEF86 | W61619 | WO9831799-A2 | Cancer |
| HSBBF02 | W61620 | WO9831799-A2 | Cancer |
| HLTAH80 | W61621 | WO9831799-A2 | Cancer |
| HTPBA27 | W61622 | WO9831799-A2 | Cancer |
| HAIDQ59 | W61623 | WO9831799-A2 | Cancer |
| HHFEK40 | W61624 | WO9831799-A2 | Cancer |
| HGBGV89 | W61625 | WO9831799-A2 | Digestive |
| HUVBB80 | W61626 | WO9831799-A2 | Cancer |
| HJACE54 | W61627 | WO9831799-A2 | Cancer |
| HROAD63 | W61628 | WO9831799-A2 | Connective/Epithelial, |
| | | | Digestive |
| HMWGS46 | W61629 | WO9831799-A2 | Cancer |
| HNFGW06 | W61630 | WO9831799-A2 | Cancer |
| HFCAR05 | W61912 | WO9820042-A1 | Cancer |
| HHFHG78 | W62595 | WO9827932-A2 | Cancer |
| HBGBA67 | W63123 | WO9833915-A1 | Cancer |
| HPHAE52 | W63622 | WO9830694-A2 | Cancer |
| HTPCH84 | W63623 | WO9830694-A2 | Cancer |
| HEBCI67 | W64433 | WO9829438-A2 | Cancer |
| HCUDS60 | W64483 | WO9832856-A1 | Cancer |
| HPRCB54 | W64668 | WO9830693-A2 | Cancer |
| HTOCD71 | W69220 | WO9828421-A1 | Cancer |
| HSGSA61 | W69221 | WO9828420-A1 | Cancer |
| HSLAZ11 | W69229 | WO9831801-A1 | Cancer |
| HCEBJ50 | W69230 | WO9831801-A1 | Cancer |
| HMQDO20 | W69231 | WO9831806-A2 | Cancer |
| HDPMK33 | W69232 | WO9831806-A2 | Cancer |
| HMPAP73 | W69233 | WO9831806-A2 | Immune/Hematopoietic |
| HMSHH46 | W69234 | WO9831806-A2 | Cancer |
| HMAAB68 | W69235 | WO9831806-A2 | Digestive, |
| | | | Immune/Hematopoietic |
| HSDME38 | W69508 | WO9828422-A1 | Cancer |
| HOEBN05 | W70286 | WO9833920-A2 | Cancer |
| HDPMJ44 | W70287 | WO9835039-A1 | Cancer |
| HODAH63 | W70330 | WO9823749-A1 | Neural/Sensory, |
| | | | Reproductive |
| HETDW91 | W70458 | WO9838311-A1 | Cancer |
| HE8CV92 | W70459 | WO9838311-A1 | Cancer |
| HIBCL22 | W70501 | US5817477-A | Cancer |
| HKFBA76 | W70525 | WO9844111-A1 | Cancer |
| HKFBA76 | W70526 | WO9844111-A1 | Cancer |
| HMSAF34 | W70594 | WO9844118-A1 | Cancer |
| HMSAF34 | W70596 | WO9844118-A1 | Cancer |
| HMSAF34 | W70597 | WO9844118-A1 | Cancer |
| HRDCD54 | W71592 | WO9833912-A1 | Cancer |
| HIBEC52 | W73130 | US5830744-A | Cancer |
| HSRAW34 | W73635 | US5861272-A | Cancer |
| HBWAL95 | W76212 | WO9837194-A1 | Cancer |
| HTEJQ70 | W76251 | WO9831818-A2 | Cancer |
| HETBW05 | W76253 | WO9831818-A2 | Digestive, |
| | | | Reproductive |
| HATBG78 | W77493 | US5798223-A | Endocrine |
| HMWGS46 | W78168 | WO9856804-A1 | Cancer |
| HOUCQ17 | W78189 | WO9856804-A1 | Cancer |
| HMWGS46 | W78295 | WO9856804-A1 | Cancer |
| HLYBX88 | W79083 | WO9841629-A2 | Cancer |
| HTAAW41 | W80212 | WO9844112-A1 | Cancer |
| HOUCQ17 | W80285 | EP874050-A2 | Cancer |
| HMELK96 | W81059 | WO9856892-A1 | Cancer |
| HLJBI75 | W81071 | WO9851794-A1 | Cancer |
| HFCBS02 | W81106 | WO9844109-A1 | Cancer |
| HHPGS02 | W81576 | WO9850549-A2 | Cancer |
| HTOBH93 | W83929 | US5844081-A | Cancer |
| HSSAE30 | W84184 | WO9853069-A2 | Cancer |
| HCQAS17 | W84274 | US5861494-A | Digestive, |
| | | | Mixed Fetal, |
| | | | Reproductive |
| HRGBQ38 | W85561 | US5849286-A | Cancer |
| HFCCE09 | W85562 | US5849286-A | Cancer |
| HGOCA18 | W85563 | US5849286-A | Cancer |
| HMSIB42 | W87769 | WO9854199-A1 | Cancer |
| HTECE68 | W89575 | US5858705-A | Cancer |
| HESAJ20 | W92460 | US5871969-A | Cancer |
| HESAJ20 | W92469 | US5871969-A | Cancer |
| HTXEI33 | W92523 | US5874240-A | Cancer |
| HTXEI33 | W92524 | US5874240-A | Cancer |
| HKABO35 | W92792 | WO9854202-A1 | Cancer |
| HCEGH45 | W94074 | US5869632-A | Immune/Hematopoietic, |
| | | | Mixed Fetal, |
| | | | Neural/Sensory |
| HNFIR05 | W94466 | WO9900415-A1 | Cancer |
| HTTBN61 | W95538 | JP11000170-A | Cancer |
| HPFCA19 | W96192 | WO9900498-A1 | Cancer |
| HPFCA19 | W96193 | WO9900498-A1 | Cancer |
| HTSGS30 | W97350 | WO9903982-A1 | Digestive, |
| | | | Immune/Hematopoietic, |
| | | | Mixed Fetal |
| HDTAH85 | Y01098 | WO9910364-A1 | Cancer |
| HFJAB36 | Y02608 | WO9923106-A1 | Cancer |
| HDTBS70 | Y03231 | WO9909152-A1 | Cancer |
| HNGEF08 | Y03849 | WO9909198-A1 | Immune/Hematopoietic, |
| | | | Reproductive |
| HUKEJ46 | Y03850 | WO9909198-A1 | Digestive, |
| | | | Reproductive |
| HPASD50 | Y04120 | WO9909161-A1 | Cancer |
| HPASD50 | Y04121 | WO9909161-A1 | Cancer |
| HAGFE38 | Y05451 | WO9857989-A1 | Cancer |
| HFVIF40 | Y06461 | WO9931116-A1 | Cancer |
| HFCCQ50 | Y06462 | WO9931116-A1 | Cancer |
| HT4CC72 | Y06473 | WO9935262-A2 | Immune/Hematopoietic |
| HDPIE88 | Y06511 | WO9936565-A1 | Cancer |
| HWFBG79 | Y10797 | WO9907891-A1 | Cancer |
| HDGRC02 | Y13736 | US5928890-A | Cancer |
| HFCET92 | Y14078 | WO9921575-A1 | Cancer |
| HUVEO91 | Y14132 | WO9923105-A1 | Cancer |
| HUVEO91 | Y14133 | WO9923105-A1 | Cancer |
| HCABA58 | Y16587 | US5916769-A | Cancer |
| HOSBD47 | Y22320 | US5932540-A | Cancer |
| HOSBD47 | Y22321 | US5932540-A | Cancer |
| HPRCC57 | Y23761 | WO9932135-A1 | Cancer |
| HMEAA94 | Y23884 | WO9935160-A1 | Cancer |
| HL1AP03 | Y23885 | WO9935160-A1 | Cancer |
| HSYBM46 | Y23886 | WO9935160-A1 | Cancer |
| HFKBC47 | Y23887 | WO9935160-A1 | Cancer |
| HSSAWS4 | Y24249 | US5929225-A | Cancer |
| HCUDE60 | Y25708 | WO9938882-A1 | Cancer |
| HHFCU19 | Y27005 | US5928924-A | Cancer |
| HMWJH67 | Y28640 | WO9940183-A1 | Cancer |
| HKAFV61 | Y28642 | WO9940183-A1 | Cancer |
| HETDK50 | Y28643 | WO9940183-A1 | Cancer |
| HKAEF09 | Y28644 | WO9940183-A1 | Cancer |
| HOSBD47 | Y30518 | WO9946364-A1 | Cancer |
| HOSBD47 | Y30519 | WO9946364-A1 | Cancer |
| HILBI36 | Y31242 | US5955339-A | Cancer |
| HTAEK53 | Y31810 | WO9947538-A1 | Cancer |
| HT4CC72 | Y31885 | WO9942584-A1 | lmmune/Hematopoietic |
| HLMBA70 | Y32504 | US5945309-A | Immune/Hematopoietic, |
| | | | Mixed Fetal, |
| | | | Reproductive |
| HPRCC57 | Y32888 | WO9941282-A1 | Cancer |
| HPRCC57 | Y32895 | WO9941282-A1 | Cancer |
| HPRCC57 | Y32896 | WO9941282-A1 | Cancer |
| HPRCC57 | Y32897 | WO9941282-A1 | Cancer |
| HPRCC57 | Y32898 | WO9941282-A1 | Cancer |
| HPRCC57 | Y32901 | WO9941282-A1 | Cancer |
| HPRCC57 | Y32905 | WO9941282-A1 | Cancer |
| HPRCC57 | Y32916 | WO9941282-A1 | Cancer |
| HMEIP65 | Y33847 | US5952197-A | Cancer |
| HFCCQ50 | Y36339 | WO9931117-A1 | Cancer |
| HFCCQ50 | Y36342 | WO9931117-A1 | Cancer |
| HRDCD54 | Y36648 | WO9931117-A1 | Cancer |
| HRDCD54 | Y36650 | WO9931117-A1 | Cancer |
| HRDCD54 | Y36673 | WO9931117-A1 | Cancer |
| HTSEX82 | Y41161 | US5981231-A | Digestive, |
| | | | Immune/Hematopoietic |
| HGBAN46 | Y41163 | US5981230-A | Cancer |
| HE9DR66 | Y41164 | US5981230-A | Cancer |
| HRGBQ38 | Y42150 | US5968797-A | Cancer |
| HFCCE09 | Y42151 | US5968797-A | Cancer |
| HGOCA18 | Y42152 | US5968797-A | Cancer |
| HNFEM05 | Y42165 | WO9927078-A1 | Cancer |
| HJACE54 | Y44510 | WO200001728-A1 | Cancer |
| HKAEF92 | Y44664 | WO9962934-A1 | Cancer |
| HBZSD43 | Y45003 | WO200006589-A1 | Cancer |
| HUVEO91 | Y45032 | WO200008139-A1 | Cancer |
| HTOBH93 | Y49535 | US5977309-A | Cancer |
| HAPOR40 | Y49946 | WO9914240-A1 | Cancer |
| HHEAC71 | Y52158 | WO9920758-A1 | Connective/Epithelial, |
| | | | Immune/Hematopoietic |
| HCFAZ22 | Y52159 | WO9920758-A1 | Cancer |
| HT5EA78 | Y52160 | WO9920758-A1 | Connective/Epithelial, |
| | | | Immune/Hematopoietic |
| HDPJO39 | Y52479 | WO9940184-A1 | Cancer |
| HBICD95 | Y53061 | US5998171-A | Cancer |
| HTGED19 | Y53890 | WO9961617-A1 | Immune/Hematopoietic |
| HFPBX96 | Y53891 | WO9961617-A1 | Cancer |
| HFKCU96 | Y54900 | US5986069-A | Cancer |
| HSBBC75 | Y55748 | US5994103-A | Cancer |
| HLFBE10 | Y55750 | US5994103-A | Cancer |
| HLFBE10 | Y57166 | US5994301-A | Cancer |
| HIBCL22 | Y57167 | US5994506-A | Cancer |
| HTTER36 | Y58185 | US6004780-A | Cardiovascular, |
| | | | Connective/Epithelial, |
| | | | Reproductive |
| HWHGU74 | Y59247 | WO9962927-A1 | Cancer |
| HSDFB55 | Y67239 | US6008020-A | Cancer |
| HE2BG16 | Y67356 | US5998164-A | Cancer |
| HKAPI15 | Y68800 | WO200005371-A1 | Connective/Epithelial |
| HTWAF38 | Y69674 | US6013483-A | Cancer |
| HATCK89 | Y69675 | US6013477-A | Cancer |
| HAPOR40 | Y70591 | WO200015759-A1 | Cancer |
| HMUAN45 | Y70785 | WO200023572-A1 | Cancer |
| HATCK89 | Y71884 | WO200067775-A1 | Cancer |
| HKGDL36 | Y71959 | WO200066778-A1 | Cancer |
| HCUDS60 | Y72022 | WO200067793-A1 | Cancer |
| HCUDS60 | Y72023 | WO200067793-A1 | Cancer |
| HETAN67 | Y78790 | US6013469-A | Cancer |
| HDGNR10 | Y80128 | US6025154-A | Digestive, |
| | | | Immune/Hematopoietic, |
| | | | Reproductive |
| HBGBA67 | Y87779 | US6054289-A | Cancer |
| HE2CB95 | Y87780 | US6054289-A | Immune/Hematopoietic, |
| | | | Mixed Fetal |
| HPTTK55 | Y87782 | US6054289-A | Cancer |
| HARAO63 | Y87783 | US6054289-A | Cancer |
| HLHAR55 | Y87787 | US6054289-A | Cancer |
| HSRDG78 | Y87788 | US6054289-A | Cancer |
| HCCAA03 | Y87789 | US6054289-A | Cancer |
| HWLLM34 | Y90351 | WO200052136-A2 | Cancer |
| HA5AA37 | Y90352 | WO200052136-A2 | Cancer |
| HDPAK85 | Y90353 | WO200052136-A2 | Cancer |
| HPHAE52 | Y90357 | WO200052028-A1 | Cancer |
| HTPCH84 | Y90358 | WO200052028-A1 | Cancer |
| HMKEA94 | Y93650 | WO200036105-A1 | Cancer |
| HOEDH76 | Y93912 | WO200039166-A1 | Cancer |
| HOGCC45 | Y93951 | WO200039136-A2 | Cancer |
| HTSGS30 | Y93973 | WO200042189-A1 | Digestive, |
| | | | Immune/Hematopoietic, |
| | | | Mixed Fetal |
| HTSGS30 | Y93975 | WO200042189-A1 | Digestive, |
| | | | Immune/Hematopoietic, |
| | | | Mixed Fetal |
| HMWCF06 | Y94802 | WO200009148-A1 | Cancer |
| HE9DR66 | Y95534 | WO200040726-A1 | Cancer |
| HGBAN46 | Y95535 | WO200040726-A1 | Cancer |
| HE9DR66 | Y95563 | WO200040726-A1 | Cancer |
| HE9DR66 | Y95565 | WO200040726-A1 | Cancer |
| HE9DR66 | Y95566 | WO200040726-A1 | Cancer |
| HE9DR66 | Y95567 | WO200040726-A1 | Cancer |
| HE9DR66 | Y95568 | WO200040726-A1 | Cancer |
| HE9DR66 | Y95569 | WO200040726-A1 | Cancer |
| HE9DR66 | Y95570 | WO200040726-A1 | Cancer |
| HE9DR66 | Y95571 | WO200040726-A1 | Cancer |
| HE9DR66 | Y95572 | WO200040726-A1 | Cancer |
| HE9DR66 | Y95573 | WO200040726-A1 | Cancer |
| HE9DR66 | Y95574 | WO200040726-A1 | Cancer |
| HE9DR66 | Y95575 | WO200040726-A1 | Cancer |
| HE9DR66 | Y95576 | WO200040726-A1 | Cancer |
| HE9DR66 | Y95577 | WO200040726-A1 | Cancer |
| HE9DR66 | Y95578 | WO200040726-A1 | Cancer |
| HHEAC71 | Y95879 | WO200050459-A1 | Connective/Epithelial, |
| | | | Immune/Hematopoietic |
| HCFAZ22 | Y95880 | WO200050459-A1 | Cancer |
| HT5EA78 | Y95881 | WO200050459-A1 | Connective/Epithelial, |
| | | | Immune/Hematopoietic |
| HDPAK85 | Y96099 | WO200052135-A2 | Cancer |
| HWLLM34 | Y96100 | WO200052135-A2 | Cancer |
| HA5AA37 | Y96101 | WO200052135-A2 | Cancer |
| HAPAT57 | Y96280 | WO200028035-A1 | Cancer |
| HAPAT57 | Y96282 | WO200028035-A1 | Cancer |
| HKABZ65 | Y96962 | WO200039327-A1 | Connective/Epithelial |
| HWHGB15 | Y96963 | WO200039327-A1 | Connective/Epithelial |
| HCDDP40 | Y96964 | WO200039327-A1 | Immune/Hematopoietic, |
| | | | Musculoskeletal |
| HOSBD47 | Y97144 | WO200045835-A1 | Cancer |
| HOSBD47 | Y97145 | WO200045835-A1 | Cancer |
| HFITF82 | SEQ ID NO: 73 | | Immune/Hematopoietic, |
| | | | Musculoskeletal |
| HFITF82 | SEQ ID NO: 74 | | Immune/Hematopoietic, |
| | | | Musculoskeletal |
| HFITF82 | SEQ ID NO: 75 | | Immune/Hematopoietic, |
| | | | Musculoskeletal |
| HFITF82 | SEQ ID NO: 76 | | Immune/Hematopoietic, |
| | | | Musculoskeletal |
| HBZAI19 | SEQ ID NO: 77 | | Immune/Hematopoietic, |
| | | | Reproductive |
| HBZAI19 | SEQ ID NO: 78 | | Immune/Hematopoietic, |
| | | | Reproductive |
| HBZAI19 | SEQ ID NO: 79 | | Immune/Hematopoietic, |
| | | | Reproductive |
| HDPDI45 | SEQ ID NO: 80 | | Cancer |
| HDPDI45 | SEQ ID NO: 81 | | Cancer |
| HETHW90 | SEQ ID NO: 82 | | Cancer |
| HETHW90 | SEQ ID NO: 83 | | Cancer |
| HETHW90 | SEQ ID NO: 84 | | Cancer |
| HIBEB47 | SEQ ID NO: 85 | | Digestive, |
| | | | Mixed Fetal, |
| | | | Neural/Sensory |
| HIBEB47 | SEQ ID NO: 86 | | Digestive, |
| | | | Mixed Fetal, |
| | | | Neural/Sensory |
| HIBEB47 | SEQ ID NO: 87 | | Digestive, |
| | | | Mixed Fetal, |
| | | | Neural/Sensory |
| HIBEB47 | SEQ ID NO: 88 | | Digestive, |
| | | | Mixed Fetal, |
| | | | Neural/Sensory |
| HLHFR58 | SEQ ID NO: 89 | | Cancer |
| HLHFR58 | SEQ ID NO: 90 | | Cancer |
| HLHFR58 | SEQ ID NO: 91 | | Cancer |
| HLHFR58 | SEQ ID NO: 92 | | Cancer |
| HNGGK54 | SEQ ID NO: 93 | | Cancer |
| HNGGK54 | SEQ ID NO: 94 | | Cancer |
| HNGGK54 | SEQ ID NO: 95 | | Cancer |
| HNGGK54 | SEQ ID NO: 96 | | Cancer |
| HUSIE23 | SEQ ID NO: 97 | | Cancer |
| HUSIE23 | SEQ ID NO: 98 | | Cancer |
| HARMB79 | SEQ ID NO: 99 | | Cancer |
| HARMB79 | SEQ ID NO: 100 | | Cancer |
| HJBCY84 | SEQ ID NO: 101 | | Cancer |
| HJBCY84 | SEQ ID NO: 102 | | Cancer |
| HJBCY84 | SEQ ID NO: 103 | | Cancer |
| HCMSC92 | SEQ ID NO: 104 | | Cancer |
| HCMSC92 | SEQ ID NO: 105 | | Cancer |
| HE2AX96 | SEQ ID NO: 106 | | Mixed Fetal |
| HE2AX96 | SEQ ID NO: 107 | | Mixed Fetal |
| HE2AX96 | SEQ ID NO: 108 | | Mixed Fetal |
| HHPDV90 | SEQ ID NO: 109 | | Cancer |
| HHPDV90 | SEQ ID NO: 110 | | Cancer |
| HHPDV90 | SEQ ID NO: 111 | | Cancer |
| HT2SG64 | SEQ ID NO: 112 | | Digestive, |
| | | | Immune/Hematopoietic |
| HT2SG64 | SEQ ID NO: 113 | | Digestive, |
| | | | Immune/Hematopoietic |
| HT2SG64 | SEQ ID NO: 114 | | Digestive, |
| | | | Immune/Hematopoietic |
| HAGAN21 | SEQ ID NO: 115 | | Digestive, |
| | | | Immune/Hematopoietic, |
| | | | Neural/Sensory |
| HAGAN21 | SEQ ID NO: 116 | | Digestive, |
| | | | Immune/Hematopoietic, |
| | | | Neural/Sensory |
| HAGAN21 | SEQ ID NO: 117 | | Digestive, |
| | | | Immune/Hematopoietic, |
| | | | Neural/Sensory |
| HAGAN21 | SEQ ID NO: 118 | | Digestive, |
| | | | Immune/Hematopoietic, |
| | | | Neural/Sensory |
| HAGAN21 | SEQ ID NO: 119 | | Digestive, |
| | | | Immune/Hematopoietic, |
| | | | Neural/Sensory |
| HEBAH57 | SEQ ID NO: 120 | | Neural/Sensory |
| HEBAH57 | SEQ ID NO: 121 | | Neural/Sensory |
| HEBAH57 | SEQ ID NO: 122 | | Neural/Sensory |
| HETDB76 | SEQ ID NO: 123 | | Musculoskeletal, |
| | | | Reproductive |
| HETDB76 | SEQ ID NO: 124 | | Musculoskeletal, |
| | | | Reproductive |
| HETDB76 | SEQ ID NO: 125 | | Musculoskeletal, |
| | | | Reproductive |
| HETDB76 | SEQ ID NO: 126 | | Musculoskeletal, |
| | | | Reproductive |
| HE8SE91 | SEQ ID NO: 127 | | Cancer |
| HE8SE91 | SEQ ID NO: 128 | | Cancer |
| HE8SE91 | SEQ ID NO: 129 | | Cancer |
| HRGBL78 | SEQ ID NO: 130 | | Cancer |
| HRGBL78 | SEQ ID NO: 131 | | Cancer |
| HRGBL78 | SEQ ID NO: 132 | | Cancer |
| HRGBL78 | SEQ ID NO: 133 | | Cancer |
| HHFUC40 | SEQ ID NO: 134 | | Cardiovascular |
| HHFUC40 | SEQ ID NO: 135 | | Cardiovascular |
| HETCP58 | SEQ ID NO: 136 | | Immune/Hematopoietic, |
| | | | Reproductive |
| HETCP58 | SEQ ID NO: 137 | | Immune/Hematopoietic, |
| | | | Reproductive |
| HETCP58 | SEQ ID NO: 138 | | Immune/Hematopoietic, |
| | | | Reproductive |
| HTTBM40 | SEQ ID NO: 139 | | Cancer |
| HTTBM40 | SEQ ID NO: 140 | | Cancer |
| HTTBS64 | SEQ ID NO: 141 | | Reproductive |
| HTTBS64 | SEQ ID NO: 142 | | Reproductive |
| HTTBS64 | SEQ ID NO: 143 | | Reproductive |
| HCEVB32 | SEQ ID NO: 144 | | Cancer |
| HCEVB32 | SEQ ID NO: 145 | | Cancer |
| HCEVB32 | SEQ ID NO: 146 | | Cancer |
| HCEVB32 | SEQ ID NO: 147 | | Cancer |
| HHPFU18 | SEQ ID NO: 148 | | Cancer |
| HHPFU18 | SEQ ID NO: 149 | | Cancer |
| HPRCA90 | SEQ ID NO: 150 | | Cancer |
| HPRCA90 | SEQ ID NO: 151 | | Cancer |
| HPRCA90 | SEQ ID NO: 152 | | Cancer |
| HPRCA90 | SEQ ID NO: 153 | | Cancer |
| HPRCE33 | SEQ ID NO: 154 | | Cancer |
| HPRCE33 | SEQ ID NO: 155 | | Cancer |
| HHFFU55 | SEQ ID NO: 156 | | Cardiovascular, |
| | | | Immune/Hematopoietic |
| HHFFU55 | SEQ ID NO: 157 | | Cardiovascular, |
| | | | Immune/Hematopoietic |
| HUVDP63 | SEQ ID NO: 158 | | Cancer |
| HUVDP63 | SEQ ID NO: 159 | | Cancer |
| HUVDP63 | SEQ ID NO: 160 | | Cancer |
| HUVDP63 | SEQ ID NO: 161 | | Cancer |
| HUVDP63 | SEQ ID NO: 162 | | Cancer |
| HCEFI77 | SEQ ID NO: 163 | | Neural/Sensory |
| HCEFI77 | SEQ ID NO: 164 | | Neural/Sensory |
| HCEFI77 | SEQ ID NO: 165 | | Neural/Sensory |
| HHFDH56 | SEQ ID NO: 166 | | Cancer |
| HHFDN48 | SEQ ID NO: 167 | | Cancer |
| HHFDN48 | SEQ ID NO: 168 | | Cancer |
| HHFDN48 | SEQ ID NO: 169 | | Cancer |
| HHFDN48 | SEQ ID NO: 170 | | Cancer |
| HHFDN48 | SEQ ID NO: 171 | | Cancer |
| HHFDN67 | SEQ ID NO: 172 | | Cardiovascular |
| HHFDN67 | SEQ ID NO: 173 | | Cardiovascular |
| HHFDG51 | SEQ ID NO: 174 | | Connective/Epithelial, |
| | | | Musculoskeletal |
| HHFDG51 | SEQ ID NO: 175 | | Connective/Epithelial, |
| | | | Musculoskeletal |
| HHFDG51 | SEQ ID NO: 176 | | Connective/Epithelial, |
| | | | Musculoskeletal |
| HE8AO36 | SEQ ID NO: 177 | | Cancer |
| HE8AO36 | SEQ ID NO: 178 | | Cancer |
| HE8AO36 | SEQ ID NO: 179 | | Cancer |
| HTPAB57 | SEQ ID NO: 180 | | Cancer |
| HTPAB57 | SEQ ID NO: 181 | | Cancer |
| HTPAB57 | SEQ ID NO: 182 | | Cancer |
| HTPAB57 | SEQ ID NO: 183 | | Cancer |
| HFXAX45 | SEQ ID NO: 184 | | Neural/Sensory |
| HFXAX45 | SEQ ID NO: 185 | | Neural/Sensory |
| HFXAX45 | SEQ ID NO: 186 | | Neural/Sensory |
| HTLBE23 | SEQ ID NO: 187 | | Reproductive |
| HTLBE23 | SEQ ID NO: 188 | | Reproductive |
| HCQAM33 | SEQ ID NO: 189 | | Musculoskeletal, |
| | | | Reproductive |
| HCQAM33 | SEQ ID NO: 190 | | Musculoskeletal, |
| | | | Reproductive |
| HCQAM33 | SEQ ID NO: 191 | | Musculoskeletal, |
| | | | Reproductive |
| HCEWE17 | SEQ ID NO: 192 | | Digestive, |
| | | | Neural/Sensory |
| HCEWE17 | SEQ ID NO: 193 | | Digestive, |
| | | | Neural/Sensory |
| HCEWE17 | SEQ ID NO: 194 | | Digestive, |
| | | | Neural/Sensory |
| HTEGI42 | SEQ ID NO: 195 | | Cancer |
| HTEGI42 | SEQ ID NO: 196 | | Cancer |
| HTEGI42 | SEQ ID NO: 197 | | Cancer |
| HTEGI42 | SEQ ID NO: 198 | | Cancer |
| HTEGI42 | SEQ ID NO: 199 | | Cancer |
| HCEIE80 | SEQ ID NO: 200 | | Cancer |
| HCEIE80 | SEQ ID NO: 201 | | Cancer |
| HCEIE80 | SEQ ID NO: 202 | | Cancer |
| HCEIE80 | SEQ ID NO: 203 | | Cancer |
| HLMCA92 | SEQ ID NO: 204 | | Digestive, |
| | | | Immune/Hematopoietic, |
| | | | Neural/Sensory |
| HLMCA92 | SEQ ID NO: 205 | | Digestive, |
| | | | Immune/Hematopoietic, |
| | | | Neural/Sensory |
| HLMCA92 | SEQ ID NO: 206 | | Digestive, |
| | | | Immune/Hematopoietic, |
| | | | Neural/Sensory |
| HLMCA92 | SEQ ID NO: 207 | | Digestive, |
| | | | Immune/Hematopoietic, |
| | | | Neural/Sensory |
| HLHCF36 | SEQ ID NO: 208 | | Respiratory |
| HLHCF36 | SEQ ID NO: 209 | | Respiratory |
| HLHCF36 | SEQ ID NO: 210 | | Respiratory |
| HCEZR26 | SEQ ID NO: 211 | | Cancer |
| HCEZR26 | SEQ ID NO: 212 | | Cancer |
| HGBCO51 | SEQ ID NO: 213 | | Cancer |
| HGBCO51 | SEQ ID NO: 214 | | Cancer |
| HGBCO51 | SEQ ID NO: 215 | | Cancer |
| HGBCO51 | SEQ ID NO: 216 | | Cancer |
| HTABP30 | SEQ ID NO: 217 | | Cancer |
| HTABP30 | SEQ ID NO: 218 | | Cancer |
| HUKCD10 | SEQ ID NO: 219 | | Cancer |
| HUKCD10 | SEQ ID NO: 220 | | Cancer |
| HUKCD10 | SEQ ID NO: 221 | | Cancer |
| HOUHT39 | SEQ ID NO: 222 | | Cancer |
| HOUHT39 | SEQ ID NO: 223 | | Cancer |
| HOUHT39 | SEQ ID NO: 224 | | Cancer |
| HTXBN56 | SEQ ID NO: 225 | | Cancer |
| HTXBN56 | SEQ ID NO: 226 | | Cancer |
| HTXBN56 | SEQ ID NO: 227 | | Cancer |
| HETEU28 | SEQ ID NO: 228 | | Cancer |
| HETEU28 | SEQ ID NO: 229 | | Cancer |
| HODDD43 | SEQ ID NO: 230 | | Cancer |
| HODDD43 | SEQ ID NO: 231 | | Cancer |
| HODDD43 | SEQ ID NO: 232 | | Cancer |
| HPWAL61 | SEQ ID NO: 233 | | Musculoskeletal, |
| | | | Reproductive |
| HPWAL61 | SEQ ID NO: 234 | | Musculoskeletal, |
| | | | Reproductive |
| HPWAL61 | SEQ ID NO: 235 | | Musculoskeletal, |
| | | | Reproductive |
| HPWAL61 | SEQ ID NO: 236 | | Musculoskeletal, |
| | | | Reproductive |
| HTSER67 | SEQ ID NO: 237 | | Cancer |
| HTSER67 | SEQ ID NO: 238 | | Cancer |
| HMSDL37 | SEQ ID NO: 239 | | Cancer |
| HMSDL37 | SEQ ID NO: 240 | | Cancer |
| HMSDL37 | SEQ ID NO: 241 | | Cancer |
| HMSDL37 | SEQ ID NO: 242 | | Cancer |
| HSDAJ53 | SEQ ID NO: 243 | | Cancer |
| HSDAJ53 | SEQ ID NO: 244 | | Cancer |
| HSDAJ53 | SEQ ID NO: 245 | | Cancer |
| HSDAJ53 | SEQ ID NO: 246 | | Cancer |
| HEBDF05 | SEQ ID NO: 247 | | Neural/Sensory |
| HEBDF05 | SEQ ID NO: 248 | | Neural/Sensory |
| HEBDF05 | SEQ ID NO: 249 | | Neural/Sensory |
| HSQFT30 | SEQ ID NO: 250 | | Cancer |
| HSQFT30 | SEQ ID NO: 251 | | Cancer |
| HSIDX71 | SEQ ID NO: 252 | | Digestive, |
| | | | Neural/Sensory |
| HSIDX71 | SEQ ID NO: 253 | | Digestive, |
| | | | Neural/Sensory |
| HSAUA82 | SEQ ID NO: 254 | | Immune/Hematopoietic, |
| | | | Reproductive |
| HSAUA82 | SEQ ID NO: 255 | | Immune/Hematopoietic, |
| | | | Reproductive |
| HPWAY46 | SEQ ID NO: 256 | | Cancer |
| HPWAY46 | SEQ ID NO: 257 | | Cancer |
| HPWAY46 | SEQ ID NO: 258 | | Cancer |
| HSSEN70 | SEQ ID NO: 259 | | Cancer |
| HSSEN70 | SEQ ID NO: 260 | | Cancer |
| HTOHB55 | SEQ ID NO: 261 | | Cancer |
| HTOHB55 | SEQ ID NO: 262 | | Cancer |
| HTOHM15 | SEQ ID NO: 263 | | Cancer |
| HTOHM15 | SEQ ID NO: 264 | | Cancer |
| HTOHM15 | SEQ ID NO: 265 | | Cancer |
| HTOHM15 | SEQ ID NO: 266 | | Cancer |
| HHNAB56 | SEQ ID NO: 267 | | Digestive |
| HHNAB56 | SEQ ID NO: 268 | | Digestive |
| HHNAB56 | SEQ ID NO: 269 | | Digestive |
| HJABL02 | SEQ ID NO: 270 | | Cancer |
| HJABL02 | SEQ ID NO: 271 | | Cancer |
| HJACG30 | SEQ ID NO: 272 | | Immune/Hematopoietic |
| HJACG30 | SEQ ID NO: 273 | | Immune/Hematopoietic |
| HJACG30 | SEQ ID NO: 274 | | Immune/Hematopoietic |
| HTAEE28 | SEQ ID NO: 275 | | Digestive, |
| | | | Immune/Hematopoietic, |
| | | | Mixed Fetal |
| HTAEE28 | SEQ ID NO: 276 | | Digestive, |
| | | | Immune/Hematopoietic, |
| | | | Mixed Fetal |
| HTAEE28 | SEQ ID NO: 277 | | Digestive, |
| | | | Immune/Hematopoietic, |
| | | | Mixed Fetal |
| HTHBG43 | SEQ ID NO: 278 | | Immune/Hematopoietic |
| HTHBG43 | SEQ ID NO: 279 | | Immune/Hematopoietic |
| HJPCE80 | SEQ ID NO: 280 | | Cancer |
| HJPCE80 | SEQ ID NO: 281 | | Cancer |
| HJPCE80 | SEQ ID NO: 282 | | Cancer |
| HTOIZ02 | SEQ ID NO: 283 | | Cancer |
| HTOIZ02 | SEQ ID NO: 284 | | Cancer |
| HJPCR70 | SEQ ID NO: 285 | | Cancer |
| HJPCR70 | SEQ ID NO: 286 | | Cancer |
| HJPCR70 | SEQ ID NO: 287 | | Cancer |
| HJPCR70 | SEQ ID NO: 288 | | Cancer |
| HJPCP42 | SEQ ID NO: 289 | | Digestive, |
| | | | Immune/Hematopoietic |
| HJPCP42 | SEQ ID NO: 290 | | Digestive, |
| | | | Immune/Hematopoietic |
| HJPCP42 | SEQ ID NO: 291 | | Digestive, |
| | | | Immune/Hematopoietic |
| HJPCP42 | SEQ ID NO: 292 | | Digestive, |
| | | | Immune/Hematopoietic |
| HNFFD47 | SEQ ID NO: 293 | | Immune/Hematopoietic |
| HNFFD47 | SEQ ID NO: 294 | | Immune/Hematopoietic |
| HNFFD47 | SEQ ID NO: 295 | | Immune/Hematopoietic |
| HNFFI46 | SEQ ID NO: 296 | | Cancer |
| HNFFI46 | SEQ ID NO: 297 | | Cancer |
| HNFFI46 | SEQ ID NO: 298 | | Cancer |
| HNFFI46 | SEQ ID NO: 299 | | Cancer |
| HNFFI46 | SEQ ID NO: 300 | | Cancer |
| HTOIQ42 | SEQ ID NO: 301 | | Cancer |
| HTOIQ42 | SEQ ID NO: 302 | | Cancer |
| HLTDW13 | SEQ ID NO: 303 | | Cancer |
| HLTDW13 | SEQ ID NO: 304 | | Cancer |
| HLTDW13 | SEQ ID NO: 305 | | Cancer |
| HLTDW13 | SEQ ID NO: 306 | | Cancer |
| HLTDW13 | SEQ ID NO: 307 | | Cancer |
| HLTDY51 | SEQ ID NO: 308 | | Cancer |
| HLTDY51 | SEQ ID NO: 309 | | Cancer |
| HNFFZ56 | SEQ ID NO: 310 | | Cancer |
| HNFFZ56 | SEQ ID NO: 311 | | Cancer |
| HNGAV54 | SEQ ID NO: 312 | | Immune/Hematopoietic |
| HNGAV54 | SEQ ID NO: 313 | | Immune/Hematopoietic |
| HSLCA15 | SEQ ID NO: 314 | | Cancer |
| HSLCA15 | SEQ ID NO: 315 | | Cancer |
| HSLCA15 | SEQ ID NO: 316 | | Cancer |
| HSLCA15 | SEQ ID NO: 317 | | Cancer |
| HSLCA15 | SEQ ID NO: 318 | | Cancer |
| HSLCA15 | SEQ ID NO: 319 | | Cancer |
| HSLCP57 | SEQ ID NO: 320 | | Cancer |
| HSLCP57 | SEQ ID NO: 321 | | Cancer |
| HTOJP95 | SEQ ID NO: 322 | | Immune/Hematopoietic |
| HTOJP95 | SEQ ID NO: 323 | | Immune/Hematopoietic |
| HBMVI55 | SEQ ID NO: 324 | | Cancer |
| HBMVI55 | SEQ ID NO: 325 | | Cancer |
| HBMVI55 | SEQ ID NO: 326 | | Cancer |
| HBMVI55 | SEQ ID NO: 327 | | Cancer |
| HBMVI55 | SEQ ID NO: 328 | | Cancer |
| HFXBS68 | SEQ ID NO: 329 | | Neural/Sensory |
| HFXBS68 | SEQ ID NO: 330 | | Neural/Sensory |
| HFXBS68 | SEQ ID NO: 331 | | Neural/Sensory |
| HFXBS68 | SEQ ID NO: 332 | | Neural/Sensory |
| HNGBC07 | SEQ ID NO: 333 | | Immune/Hematopoietic |
| HNGBC07 | SEQ ID NO: 334 | | Immune/Hematopoietic |
| HNGBC07 | SEQ ID NO: 335 | | Immune/Hematopoietic |
| HMSFK67 | SEQ ID NO: 336 | | Cancer |
| HMSFK67 | SEQ ID NO: 337 | | Cancer |
| HMSFK67 | SEQ ID NO: 338 | | Cancer |
| HCE1P80 | SEQ ID NO: 339 | | Cancer |
| HCE1P80 | SEQ ID NO: 340 | | Cancer |
| HCE1P80 | SEQ ID NO: 341 | | Cancer |
| HOUDU29 | SEQ ID NO: 342 | | Cancer |
| HOUDU29 | SEQ ID NO: 343 | | Cancer |
| HOUDU29 | SEQ ID NO: 344 | | Cancer |
| HOUDU29 | SEQ ID NO: 345 | | Cancer |
| HOUDU29 | SEQ ID NO: 346 | | Cancer |
| HHFEC49 | SEQ ID NO: 347 | | Cancer |
| HCE3T57 | SEQ ID NO: 348 | | Immune/Hematopoietic, |
| | | | Neural/Sensory, |
| | | | Reproductive |
| HCE3T57 | SEQ ID NO: 349 | | Immune/Hematopoietic, |
| | | | Neural/Sensory, |
| | | | Reproductive |
| HCE3T57 | SEQ ID NO: 350 | | Immune/Hematopoietic, |
| | | | Neural/Sensory, |
| | | | Reproductive |
| HCE3T57 | SEQ ID NO: 351 | | Immune/Hematopoietic, |
| | | | Neural/Sensory, |
| | | | Reproductive |
| HCE3T57 | SEQ ID NO: 352 | | Immune/Hematopoietic, |
| | | | Neural/Sensory, |
| | | | Reproductive |
| HCE4Y07 | SEQ ID NO: 353 | | Cancer |
| HCE4Y07 | SEQ ID NO: 354 | | Cancer |
| HCE5G23 | SEQ ID NO: 355 | | Cancer |
| HCE5G23 | SEQ ID NO: 356 | | Cancer |
| HCE5G23 | SEQ ID NO: 357 | | Cancer |
| HFCEP45 | SEQ ID NO: 358 | | Neural/Sensory |
| HFCEP45 | SEQ ID NO: 359 | | Neural/Sensory |
| HFCEP45 | SEQ ID NO: 360 | | Neural/Sensory |
| HFCEP45 | SEQ ID NO: 361 | | Neural/Sensory |
| HMWEJ52 | SEQ ID NO: 362 | | Immune/Hematopoietic |
| HMWEJ52 | SEQ ID NO: 363 | | Immune/Hematopoietic |
| HMWEY26 | SEQ ID NO: 364 | | Cancer |
| HMWEY26 | SEQ ID NO: 365 | | Cancer |
| HMWEY26 | SEQ ID NO: 366 | | Cancer |
| HMWEY26 | SEQ ID NO: 367 | | Cancer |
| HMWEY26 | SEQ ID NO: 368 | | Cancer |
| HATDM46 | SEQ ID NO: 369 | | Cancer |
| HATDM46 | SEQ ID NO: 370 | | Cancer |
| HATDM46 | SEQ ID NO: 371 | | Cancer |
| HATDM46 | SEQ ID NO: 372 | | Cancer |
| HATDM46 | SEQ ID NO: 373 | | Cancer |
| HATDM46 | SEQ ID NO: 374 | | Cancer |
| HHFHD37 | SEQ ID NO: 375 | | Cardiovascular, |
| | | | Immune/Hematopoietic, |
| | | | Respiratory |
| HHFHD37 | SEQ ID NO: 376 | | Cardiovascular, |
| | | | Immune/Hematopoietic, |
| | | | Respiratory |
| HHFHI76 | SEQ ID NO: 377 | | Cancer |
| HHFHI76 | SEQ ID NO: 378 | | Cancer |
| HATDZ29 | SEQ ID NO: 379 | | Endocrine, |
| | | | Immune/Hematopoietic |
| HATDZ29 | SEQ ID NO: 380 | | Endocrine, |
| | | | Immune/Hematopoietic |
| HFVGE32 | SEQ ID NO: 381 | | Digestive, |
| | | | Immune/Hematopoietic |
| HFVGE32 | SEQ ID NO: 382 | | Digestive, |
| | | | Immune/Hematopoietic |
| HLHFE92 | SEQ ID NO: 383 | | Cancer |
| HLHFE92 | SEQ ID NO: 384 | | Cancer |
| HLHFE92 | SEQ ID NO: 385 | | Cancer |
| HMKAI25 | SEQ ID NO: 386 | | Cancer |
| HMKAI25 | SEQ ID NO: 387 | | Cancer |
| HMKAI25 | SEQ ID NO: 388 | | Cancer |
| HMKAI25 | SEQ ID NO: 389 | | Cancer |
| HMKAI25 | SEQ ID NO: 390 | | Cancer |
| HNHEI42 | SEQ ID NO: 391 | | Endocrine, |
| | | | Immune/Hematopoietic |
| HNHEI42 | SEQ ID NO: 392 | | Endocrine, |
| | | | Immune/Hematopoietic |
| HNHEI42 | SEQ ID NO: 393 | | Endocrine, |
| | | | Immune/Hematopoietic |
| HNHEI42 | SEQ ID NO: 394 | | Endocrine, |
| | | | Immune/Hematopoietic |
| HNHEI85 | SEQ ID NO: 395 | | Digestive, |
| | | | Immune/Hematopoietic, |
| | | | Musculoskeletal |
| HNHEI85 | SEQ ID NO: 396 | | Digestive, |
| | | | Immune/Hematopoietic, |
| | | | Musculoskeletal |
| HOEDE28 | SEQ ID NO: 397 | | Cancer |
| HOEDE28 | SEQ ID NO: 398 | | Cancer |
| H2CBH03 | SEQ ID NO: 399 | | Cancer |
| HTHCA18 | SEQ ID NO: 400 | | Immune/Hematopoietic |
| HTHCA18 | SEQ ID NO: 401 | | Immune/Hematopoietic |
| HTHCO79 | SEQ ID NO: 402 | | Cancer |
| HTHCO79 | SEQ ID NO: 403 | | Cancer |
| HNGFB76 | SEQ ID NO: 404 | | Digestive, |
| | | | Immune/Hematopoietic, |
| | | | Neural/Sensory |
| HNGFB76 | SEQ ID NO: 405 | | Digestive, |
| | | | Immune/Hematopoietic, |
| | | | Neural/Sensory |
| HNGFB76 | SEQ ID NO: 406 | | Digestive, |
| | | | Immune/Hematopoietic, |
| | | | Neural/Sensory |
| HNGFB76 | SEQ ID NO: 407 | | Digestive, |
| | | | Immune/Hematopoietic, |
| | | | Neural/Sensory |
| HOQBJ82 | SEQ ID NO: 408 | | Cancer |
| HOQBJ82 | SEQ ID NO: 409 | | Cancer |
| HNFHY51 | SEQ ID NO: 410 | | Immune/Hematopoietic, |
| | | | Reproductive |
| HNFHY51 | SEQ ID NO: 411 | | Immune/Hematopoietic, |
| | | | Reproductive |
| HNFHY51 | SEQ ID NO: 412 | | Immune/Hematopoietic, |
| | | | Reproductive |
| HNFHY51 | SEQ ID NO: 413 | | Immune/Hematopoietic, |
| | | | Reproductive |
| HNEEB45 | SEQ ID NO: 414 | | Immune/Hematopoietic, |
| | | | Mixed Fetal |
| HNEEB45 | SEQ ID NO: 415 | | Immune/Hematopoietic, |
| | | | Mixed Fetal |
| HSDFA44 | SEQ ID NO: 416 | | Neural/Sensory |
| HSDFA44 | SEQ ID NO: 417 | | Neural/Sensory |
| HSDFA44 | SEQ ID NO: 418 | | Neural/Sensory |
| HAGEB14 | SEQ ID NO: 419 | | Cancer |
| HAGEB14 | SEQ ID NO: 420 | | Cancer |
| HCGBE81 | SEQ ID NO: 421 | | Neural/Sensory, |
| | | | Reproductive |
| HCGBE81 | SEQ ID NO: 422 | | Neural/Sensory, |
| | | | Reproductive |
| HEOMX53 | SEQ ID NO: 423 | | Digestive, |
| | | | Immune/Hematopoietic, |
| | | | Neural/Sensory |
| HEOMX53 | SEQ ID NO: 424 | | Digestive, |
| | | | Immune/Hematopoietic, |
| | | | Neural/Sensory |
| HEOMX53 | SEQ ID NO: 425 | | Digestive, |
| | | | Immune/Hematopoietic, |
| | | | Neural/Sensory |
| HEONC95 | SEQ ID NO: 426 | | Cancer |
| HEONC95 | SEQ ID NO: 427 | | Cancer |
| HKMLP68 | SEQ ID NO: 428 | | Excretory, |
| | | | Mixed Fetal, |
| | | | Reproductive |
| HKMLP68 | SEQ ID NO: 429 | | Excretory, |
| | | | Mixed Fetal, |
| | | | Reproductive |
| HKMLP68 | SEQ ID NO: 430 | | Excretory, |
| | | | Mixed Fetal, |
| | | | Reproductive |
| HMWIG83 | SEQ ID NO: 431 | | Cancer |
| HMWIG83 | SEQ ID NO: 432 | | Cancer |
| HMSKH19 | SEQ ID NO: 433 | | Cancer |
| HMSKH19 | SEQ ID NO: 434 | | Cancer |
| HMSKH19 | SEQ ID NO: 435 | | Cancer |
| HFAME37 | SEQ ID NO: 436 | | Neural/Sensory |
| HFAME37 | SEQ ID NO: 437 | | Neural/Sensory |
| HFAME37 | SEQ ID NO: 438 | | Neural/Sensory |
| HFXFG45 | SEQ ID NO: 439 | | Immune/Hematopoietic, |
| | | | Neural/Sensory |
| HFXFG45 | SEQ ID NO: 440 | | Immune/Hematopoietic, |
| | | | Neural/Sensory |
| HFXFG45 | SEQ ID NO: 441 | | Immune/Hematopoietic, |
| | | | Neural/Sensory |
| HFXFG45 | SEQ ID NO: 442 | | Immune/Hematopoietic, |
| | | | Neural/Sensory |
| HFXFH04 | SEQ ID NO: 443 | | Immune/Hematopoietic, |
| | | | Neural/Sensory |
| HFXFH04 | SEQ ID NO: 444 | | Immune/Hematopoietic, |
| | | | Neural/Sensory |
| HFXFH04 | SEQ ID NO: 445 | | Immune/Hematopoietic, |
| | | | Neural/Sensory |
| HFXFH04 | SEQ ID NO: 446 | | Immune/Hematopoietic, |
| | | | Neural/Sensory |
| HGCAC66 | SEQ ID NO: 447 | | Cancer |
| HGCAC66 | SEQ ID NO: 448 | | Cancer |
| HSSJF55 | SEQ ID NO: 449 | | Musculoskeletal |
| HSSJF55 | SEQ ID NO: 450 | | Musculoskeletal |
| HFXHM17 | SEQ ID NO: 451 | | Cancer |
| HFXHM17 | SEQ ID NO: 452 | | Cancer |
| HFXHM17 | SEQ ID NO: 453 | | Cancer |
| HFXHM17 | SEQ ID NO: 454 | | Cancer |
| HOSFQ65 | SEQ ID NO: 455 | | Cancer |
| HOSFQ65 | SEQ ID NO: 456 | | Cancer |
| HOSFQ65 | SEQ ID NO: 457 | | Cancer |
| HOSFQ65 | SEQ ID NO: 458 | | Cancer |
| HOSFQ65 | SEQ ID NO: 459 | | Cancer |
| HKGAS32 | SEQ ID NO: 460 | | Connective/Epithelial, |
| | | | Neural/Sensory |
| HKGAS32 | SEQ ID NO: 461 | | Connective/Epithelial, |
| | | | Neural/Sensory |
| HKGAU45 | SEQ ID NO: 462 | | Immune/Hematopoietic |
| HKGAU45 | SEQ ID NO: 463 | | Immune/Hematopoietic |
| HKGAU45 | SEQ ID NO: 464 | | Immune/Hematopoietic |
| HKGBH24 | SEQ ID NO: 465 | | Cancer |
| HKGBH24 | SEQ ID NO: 466 | | Cancer |
| HKGBH24 | SEQ ID NO: 467 | | Cancer |
| HKGBS01 | SEQ ID NO: 468 | | Cancer |
| HKGBS01 | SEQ ID NO: 469 | | Cancer |
| HKGBS01 | SEQ ID NO: 470 | | Cancer |
| HACCL63 | SEQ ID NO: 471 | | Cancer |
| HACCL63 | SEQ ID NO: 472 | | Cancer |
| HACCL63 | SEQ ID NO: 473 | | Cancer |
| HACCL63 | SEQ ID NO: 474 | | Cancer |
| HFIIN69 | SEQ ID NO: 475 | | Musculoskeletal, |
| | | | Neural/Sensory, |
| | | | Reproductive |
| HFIIN69 | SEQ ID NO: 476 | | Musculoskeletal, |
| | | | Neural/Sensory, |
| | | | Reproductive |
| HFIIN69 | SEQ ID NO: 477 | | Musculoskeletal, |
| | | | Neural/Sensory, |
| | | | Reproductive |
| HFIIZ70 | SEQ ID NO: 478 | | Cancer |
| HFIIZ70 | SEQ ID NO: 479 | | Cancer |
| HMIAJ30 | SEQ ID NO: 480 | | Cancer |
| HMIAJ30 | SEQ ID NO: 481 | | Cancer |
| HMIAJ30 | SEQ ID NO: 482 | | Cancer |
| HMIAJ30 | SEQ ID NO: 483 | | Cancer |
| HMIAV73 | SEQ ID NO: 484 | | Cancer |
| HMIAV73 | SEQ ID NO: 485 | | Cancer |
| HMIAV73 | SEQ ID NO: 486 | | Cancer |
| HMIAV73 | SEQ ID NO: 487 | | Cancer |
| HAPOD80 | SEQ ID NO: 488 | | Cancer |
| HISBL03 | SEQ ID NO: 489 | | Cancer |
| HISBL03 | SEQ ID NO: 490 | | Cancer |
| HISBL03 | SEQ ID NO: 491 | | Cancer |
| HISBL03 | SEQ ID NO: 492 | | Cancer |
| HISBL03 | SEQ ID NO: 493 | | Cancer |
| HISBL03 | SEQ ID NO: 494 | | Cancer |
| HISBL03 | SEQ ID NO: 495 | | Cancer |
| HMICK94 | SEQ ID NO: 496 | | Cancer |
| HMICK94 | SEQ ID NO: 497 | | Cancer |
| HMICK94 | SEQ ID NO: 498 | | Cancer |
| HISBF60 | SEQ ID NO: 499 | | Cancer |
| HISBF60 | SEQ ID NO: 500 | | Cancer |
| HISBF60 | SEQ ID NO: 501 | | Cancer |
| HISBF60 | SEQ ID NO: 502 | | Cancer |
| HISBF60 | SEQ ID NO: 503 | | Cancer |
| HMVAV54 | SEQ ID NO: 504 | | Immune/Hematopoietic |
| HMVAV54 | SEQ ID NO: 505 | | Immune/Hematopoietic |
| HMVAV54 | SEQ ID NO: 506 | | Immune/Hematopoietic |
| HMVAV54 | SEQ ID NO: 507 | | Immune/Hematopoietic |
| HMVAV54 | SEQ ID NO: 508 | | Immune/Hematopoietic |
| HPICB53 | SEQ ID NO: 509 | | Cancer |
| HPICB53 | SEQ ID NO: 510 | | Cancer |
| HPICC86 | SEQ ID NO: 511 | | Reproductive |
| HPICC86 | SEQ ID NO: 512 | | Reproductive |
| HPICC86 | SEQ ID NO: 513 | | Reproductive |
| HPICC86 | SEQ ID NO: 514 | | Reproductive |
| HPICC86 | SEQ ID NO: 515 | | Reproductive |
| HPJAP43 | SEQ ID NO: 516 | | Cancer |
| HPJAP43 | SEQ ID NO: 517 | | Cancer |
| HPJAP43 | SEQ ID NO: 518 | | Cancer |
| HPJCG42 | SEQ ID NO: 519 | | Immune/Hematopoietic, |
| | | | Reproductive |
| HPJCG42 | SEQ ID NO: 520 | | Immune/Hematopoietic, |
| | | | Reproductive |
| HPJCG42 | SEQ ID NO: 521 | | Immune/Hematopoietic, |
| | | | Reproductive |
| HPJCG42 | SEQ ID NO: 522 | | Immune/Hematopoietic, |
| | | | Reproductive |
| HPJCG42 | SEQ ID NO: 523 | | Immune/Hematopoietic, |
| | | | Reproductive |
| HPJBK11 | SEQ ID NO: 524 | | Cardiovascular, |
| | | | Neural/Sensory, |
| | | | Reproductive |
| HPJBK11 | SEQ ID NO: 525 | | Cardiovascular, |
| | | | Neural/Sensory, |
| | | | Reproductive |
| HPJBK11 | SEQ ID NO: 526 | | Cardiovascular, |
| | | | Neural/Sensory, |
| | | | Reproductive |
| HPJBK12 | SEQ ID NO: 527 | | Reproductive |
| HPJBK12 | SEQ ID NO: 528 | | Reproductive |
| HPJBK12 | SEQ ID NO: 529 | | Reproductive |
| HPJBK12 | SEQ ID NO: 530 | | Reproductive |
| HPJCT08 | SEQ ID NO: 531 | | Connective/Epithelial, |
| | | | Reproductive |
| HPJCT08 | SEQ ID NO: 532 | | Connective/Epithelial, |
| | | | Reproductive |
| HPJCT08 | SEQ ID NO: 533 | | Connective/Epithelial, |
| | | | Reproductive |
| HT4ES80 | SEQ ID NO: 534 | | Cancer |
| HT4ES80 | SEQ ID NO: 535 | | Cancer |
| HT4ES80 | SEQ ID NO: 536 | | Cancer |
| HNTNB49 | SEQ ID NO: 537 | | Cancer |
| HNTNB49 | SEQ ID NO: 538 | | Cancer |
| HNTRS57 | SEQ ID NO: 539 | | Cancer |
| HNTRS57 | SEQ ID NO: 540 | | Cancer |
| HNTRS57 | SEQ ID NO: 541 | | Cancer |
| HNTRS57 | SEQ ID NO: 542 | | Cancer |
| HNTRS57 | SEQ ID NO: 543 | | Cancer |
| HNTSL47 | SEQ ID NO: 544 | | Cardiovascular, |
| | | | Digestive |
| HNTSL47 | SEQ ID NO: 545 | | Cardiovascular, |
| | | | Digestive |
| HNTSL47 | SEQ ID NO: 546 | | Cardiovascular, |
| | | | Digestive |
| HBJLR70 | SEQ ID NO: 547 | | Immune/Hematopoietic, |
| | | | Neural/Sensory |
| HBJLR70 | SEQ ID NO: 548 | | Immune/Hematopoietic, |
| | | | Neural/Sensory |
| HNTSY18 | SEQ ID NO: 549 | | Cardiovascular, |
| | | | Reproductive |
| HNTSY18 | SEQ ID NO: 550 | | Cardiovascular, |
| | | | Reproductive |
| HBHME51 | SEQ ID NO: 551 | | Reproductive, |
| | | | Respiratory |
| HBHME51 | SEQ ID NO: 552 | | Reproductive, |
| | | | Respiratory |
| HBHME51 | SEQ ID NO: 553 | | Reproductive, |
| | | | Respiratory |
| HMCHR48 | SEQ ID NO: 554 | | Connective/Epithelial, |
| | | | Immune/Hematopoietic, |
| | | | Reproductive |
| HMCHR48 | SEQ ID NO: 555 | | Connective/Epithelial, |
| | | | Immune/Hematopoietic, |
| | | | Reproductive |
| HMCHR48 | SEQ ID NO: 556 | | Connective/Epithelial, |
| | | | Immune/Hematopoietic, |
| | | | Reproductive |
| HMCIJ07 | SEQ ID NO: 557 | | Immune/Hematopoietic |
| HMCIJ07 | SEQ ID NO: 558 | | Immune/Hematopoietic |
| HSIFL06 | SEQ ID NO: 559 | | Cancer |
| HSIFL06 | SEQ ID NO: 560 | | Cancer |
| HMZME33 | SEQ ID NO: 561 | | Connective/Epithelial, |
| | | | Digestive |
| HMZME33 | SEQ ID NO: 562 | | Connective/Epithelial, |
| | | | Digestive |
| HMZMF54 | SEQ ID NO: 563 | | Digestive |
| HMZMF54 | SEQ ID NO: 564 | | Digestive |
| HMZMF54 | SEQ ID NO: 565 | | Digestive |
| HMVCQ82 | SEQ ID NO: 566 | | Immune/Hematopoietic |
| HMVCQ82 | SEQ ID NO: 567 | | Immune/Hematopoietic |
| HMVCQ82 | SEQ ID NO: 568 | | Immune/Hematopoietic |
| HMVDP35 | SEQ ID NO: 569 | | Immune/Hematopoietic, |
| | | | Reproductive |
| HMVDP35 | SEQ ID NO: 570 | | Immune/Hematopoietic, |
| | | | Reproductive |
| HMVDP35 | SEQ ID NO: 571 | | Immune/Hematopoietic, |
| | | | Reproductive |
| HMVDF54 | SEQ ID NO: 572 | | Cancer |
| HMVDF54 | SEQ ID NO: 573 | | Cancer |
| HMVDF54 | SEQ ID NO: 574 | | Cancer |
| HROBM46 | SEQ ID NO: 575 | | Connective/Epithelial, |
| | | | Digestive |
| HROBM46 | SEQ ID NO: 576 | | Connective/Epithelial, |
| | | | Digestive |
| HCNDR47 | SEQ ID NO: 577 | | Cancer |
| HCNDR47 | SEQ ID NO: 578 | | Cancer |
| HCNDR47 | SEQ ID NO: 579 | | Cancer |
| HCNDV12 | SEQ ID NO: 580 | | Digestive, |
| | | | Reproductive |
| HCNDV12 | SEQ ID NO: 581 | | Digestive, |
| | | | Reproductive |
| HCNDV12 | SEQ ID NO: 582 | | Digestive, |
| | | | Reproductive |
| HSODE04 | SEQ ID NO: 583 | | Digestive |
| HSODE04 | SEQ ID NO: 584 | | Digestive |
| HBFMC03 | SEQ ID NO: 585 | | Digestive, |
| | | | Musculoskeletal, |
| | | | Reproductive |
| HBFMC03 | SEQ ID NO: 586 | | Digestive, |
| | | | Musculoskeletal, |
| | | | Reproductive |
| HHSFB67 | SEQ ID NO: 587 | | Neural/Sensory |
| HHSFB67 | SEQ ID NO: 588 | | Neural/Sensory |
| HHSFB67 | SEQ ID NO: 589 | | Neural/Sensory |
| HHSFB67 | SEQ ID NO: 590 | | Neural/Sensory |
| HHSGW69 | SEQ ID NO: 591 | | Cancer |
| HHSGW69 | SEQ ID NO: 592 | | Cancer |
| HHSGW69 | SEQ ID NO: 593 | | Cancer |
| HCLCJ15 | SEQ ID NO: 594 | | Cancer |
| HCLCJ15 | SEQ ID NO: 595 | | Cancer |
| HCLCJ15 | SEQ ID NO: 596 | | Cancer |
| HCLCJ15 | SEQ ID NO: 597 | | Cancer |
| HSLJG37 | SEQ ID NO: 598 | | Cancer |
| HSLJG37 | SEQ ID NO: 599 | | Cancer |
| HSLJG37 | SEQ ID NO: 600 | | Cancer |
| HWLEC41 | SEQ ID NO: 601 | | Cancer |
| HWLEC41 | SEQ ID NO: 602 | | Cancer |
| HWLEC41 | SEQ ID NO: 603 | | Cancer |
| HSXEQ06 | SEQ ID NO: 604 | | Cancer |
| HSXEQ06 | SEQ ID NO: 605 | | Cancer |
| HSXEQ06 | SEQ ID NO: 606 | | Cancer |
| HEEAA16 | SEQ ID NO: 607 | | Cancer |
| HEEAA16 | SEQ ID NO: 608 | | Cancer |
| HEEAA16 | SEQ ID NO: 609 | | Cancer |
| HEEAM62 | SEQ ID NO: 610 | | Reproductive |
| HEEAM62 | SEQ ID NO: 611 | | Reproductive |
| HEEAM62 | SEQ ID NO: 612 | | Reproductive |
| HEEAM62 | SEQ ID NO: 613 | | Reproductive |
| HNHKL90 | SEQ ID NO: 614 | | Immune/Hematopoietic |
| HNHKL90 | SEQ ID NO: 615 | | Immune/Hematopoietic |
| HNHKL90 | SEQ ID NO: 616 | | Immune/Hematopoietic |
| HWLFQ64 | SEQ ID NO: 617 | | Digestive |
| HWLFQ64 | SEQ ID NO: 618 | | Digestive |
| HWLFR02 | SEQ ID NO: 619 | | Cancer |
| HWLFR02 | SEQ ID NO: 620 | | Cancer |
| HWLFR02 | SEQ ID NO: 621 | | Cancer |
| HBKED12 | SEQ ID NO: 622 | | Cancer |
| HBKED12 | SEQ ID NO: 623 | | Cancer |
| HBKED12 | SEQ ID NO: 624 | | Cancer |
| HBKED12 | SEQ ID NO: 625 | | Cancer |
| HBKED12 | SEQ ID NO: 626 | | Cancer |
| HWLFJ10 | SEQ ID NO: 627 | | Cancer |
| HWLFJ10 | SEQ ID NO: 628 | | Cancer |
| HCRNO87 | SEQ ID NO: 629 | | Cancer |
| HCRNO87 | SEQ ID NO: 630 | | Cancer |
| HCRNO87 | SEQ ID NO: 631 | | Cancer |
| HCRNO87 | SEQ ID NO: 632 | | Cancer |
| HWLJX42 | SEQ ID NO: 633 | | Cancer |
| HWLJX42 | SEQ ID NO: 634 | | Cancer |
| HWLJX42 | SEQ ID NO: 635 | | Cancer |
| HSPBY63 | SEQ ID NO: 636 | | Digestive |
| HSPBY63 | SEQ ID NO: 637 | | Digestive |
| HSPBY63 | SEQ ID NO: 638 | | Digestive |
| HAPSO15 | SEQ ID NO: 639 | | Cancer |
| HAPSO15 | SEQ ID NO: 640 | | Cancer |
| HAPSO15 | SEQ ID NO: 641 | | Cancer |
| HE8QG24 | SEQ ID NO: 642 | | Mixed Fetal |
| HE8QG24 | SEQ ID NO: 643 | | Mixed Fetal |
| HE8QG24 | SEQ ID NO: 644 | | Mixed Fetal |
| HE8QV43 | SEQ ID NO: 645 | | Cancer |
| HE8QV43 | SEQ ID NO: 646 | | Cancer |
| HE8QV43 | SEQ ID NO: 647 | | Cancer |
| HE8QV43 | SEQ ID NO: 648 | | Cancer |
| HE9QN39 | SEQ ID NO: 649 | | Cancer |
| HE9QN39 | SEQ ID NO: 650 | | Cancer |
| HE9RO44 | SEQ ID NO: 651 | | Immune/Hematopoietic, |
| | | | Mixed Fetal |
| HE9RO44 | SEQ ID NO: 652 | | Immune/Hematopoietic, |
| | | | Mixed Fetal |
| HE9RO44 | SEQ ID NO: 653 | | Immune/Hematopoietic, |
| | | | Mixed Fetal |
| HE9SE18 | SEQ ID NO: 654 | | Digestive, |
| | | | Mixed Fetal |
| HE9SE18 | SEQ ID NO: 655 | | Digestive, |
| | | | Mixed Fetal |
| HE9SE18 | SEQ ID NO: 656 | | Digestive, |
| | | | Mixed Fetal |
| HISCV60 | SEQ ID NO: 657 | | Digestive |
| HISCV60 | SEQ ID NO: 658 | | Digestive |
| HE8UT25 | SEQ ID NO: 659 | | Mixed Fetal |
| HE8UT25 | SEQ ID NO: 660 | | Mixed Fetal |
| HE8UT25 | SEQ ID NO: 661 | | Mixed Fetal |
| HE8UY36 | SEQ ID NO: 662 | | Cancer |
| HE8UY36 | SEQ ID NO: 663 | | Cancer |
| HNHNT13 | SEQ ID NO: 664 | | Immune/Hematopoietic |
| HNHNT13 | SEQ ID NO: 665 | | Immune/Hematopoietic |
| HNHNT13 | SEQ ID NO: 666 | | Immune/Hematopoietic |
| HODEB50 | SEQ ID NO: 667 | | Reproductive |
| HODEB50 | SEQ ID NO: 668 | | Reproductive |
| HODEB50 | SEQ ID NO: 669 | | Reproductive |
| HNGMJ91 | SEQ ID NO: 670 | | Immune/Hematopoietic |
| HNGMJ91 | SEQ ID NO: 671 | | Immune/Hematopoietic |
| HNGMJ91 | SEQ ID NO: 672 | | Immune/Hematopoietic |
| HNGNB69 | SEQ ID NO: 673 | | Immune/Hematopoietic |
| HODFW41 | SEQ ID NO: 674 | | Reproductive |
| HODFW41 | SEQ ID NO: 675 | | Reproductive |
| HNGOI12 | SEQ ID NO: 676 | | Immune/Hematopoietic |
| HNGOI12 | SEQ ID NO: 677 | | Immune/Hematopoietic |
| HNGOI12 | SEQ ID NO: 678 | | Immune/Hematopoietic |
| HNGPM78 | SEQ ID NO: 679 | | Immune/Hematopoietic, |
| | | | Neural/Sensory |
| HNGPM78 | SEQ ID NO: 680 | | Immune/Hematopoietic, |
| | | | Neural/Sensory |
| HYASC80 | SEQ ID NO: 681 | | Cancer |
| HYASC80 | SEQ ID NO: 682 | | Cancer |
| HWLHM66 | SEQ ID NO: 683 | | Cancer |
| HWLHM66 | SEQ ID NO: 684 | | Cancer |
| HWLHM66 | SEQ ID NO: 685 | | Cancer |
| HWLHM66 | SEQ ID NO: 686 | | Cancer |
| HBBBC71 | SEQ ID NO: 687 | | Cancer |
| HBBBC71 | SEQ ID NO: 688 | | Cancer |
| HBBBC71 | SEQ ID NO: 689 | | Cancer |
| HLJBF86 | SEQ ID NO: 690 | | Cancer |
| HLJBF86 | SEQ ID NO: 691 | | Cancer |
| HLJBF86 | SEQ ID NO: 692 | | Cancer |
| HLJBJ61 | SEQ ID NO: 693 | | Cancer |
| HLJBJ61 | SEQ ID NO: 694 | | Cancer |
| HHBCS39 | SEQ ID NO: 695 | | Cancer |
| HHBCS39 | SEQ ID NO: 696 | | Cancer |
| HHBCS39 | SEQ ID NO: 697 | | Cancer |
| HLJEA01 | SEQ ID NO: 698 | | Respiratory |
| HLJEA01 | SEQ ID NO: 699 | | Respiratory |
| HLEDB16 | SEQ ID NO: 700 | | Cancer |
| HOGCK63 | SEQ ID NO: 701 | | Cancer |
| HOGCK63 | SEQ ID NO: 702 | | Cancer |
| HOFMQ33 | SEQ ID NO: 703 | | Reproductive |
| HOFMQ33 | SEQ ID NO: 704 | | Reproductive |
| HOFMQ33 | SEQ ID NO: 705 | | Reproductive |
| HOFMQ33 | SEQ ID NO: 706 | | Reproductive |
| HOFMT75 | SEQ ID NO: 707 | | Reproductive |
| HOFMT75 | SEQ ID NO: 708 | | Reproductive |
| HOFMT75 | SEQ ID NO: 709 | | Reproductive |
| HOFMT75 | SEQ ID NO: 710 | | Reproductive |
| HOGCS52 | SEQ ID NO: 711 | | Cancer |
| HOGCS52 | SEQ ID NO: 712 | | Cancer |
| HOGCS52 | SEQ ID NO: 713 | | Cancer |
| HOFNM53 | SEQ ID NO: 714 | | Reproductive |
| HOFNM53 | SEQ ID NO: 715 | | Reproductive |
| HOFNM53 | SEQ ID NO: 716 | | Reproductive |
| HOFNM53 | SEQ ID NO: 717 | | Reproductive |
| HOFOB27 | SEQ ID NO: 718 | | Cancer |
| HOFOB27 | SEQ ID NO: 719 | | Cancer |
| HOFOB27 | SEQ ID NO: 720 | | Cancer |
| HOFOB27 | SEQ ID NO: 721 | | Cancer |
| HOFOC33 | SEQ ID NO: 722 | | Reproductive |
| HOFOC33 | SEQ ID NO: 723 | | Reproductive |
| HOFOC33 | SEQ ID NO: 724 | | Reproductive |
| HOFOC33 | SEQ ID NO: 725 | | Reproductive |
| HOFOC33 | SEQ ID NO: 726 | | Reproductive |
| HOFOC33 | SEQ ID NO: 727 | | Reproductive |
| HOFOC73 | SEQ ID NO: 728 | | Cancer |
| HOFOC73 | SEQ ID NO: 729 | | Cancer |
| HOFOC73 | SEQ ID NO: 730 | | Cancer |
| HOFOC73 | SEQ ID NO: 731 | | Cancer |
| HNTAC64 | SEQ ID NO: 732 | | Cancer |
| HNTAC64 | SEQ ID NO: 733 | | Cancer |
| HNTAC64 | SEQ ID NO: 734 | | Cancer |
| HNTAC64 | SEQ ID NO: 735 | | Cancer |
| HDTBD53 | SEQ ID NO: 736 | | Cancer |
| HDTBD53 | SEQ ID NO: 737 | | Cancer |
| HDTAQ57 | SEQ ID NO: 738 | | Cancer |
| HDTAQ57 | SEQ ID NO: 739 | | Cancer |
| HDTAR06 | SEQ ID NO: 740 | | Cancer |
| HDTAR06 | SEQ ID NO: 741 | | Cancer |
| HDPML23 | SEQ ID NO: 742 | | Immune/Hematopoietic, |
| | | | Neural/Sensory |
| HDPML23 | SEQ ID NO: 743 | | Immune/Hematopoietic, |
| | | | Neural/Sensory |
| HDPML23 | SEQ ID NO: 744 | | Immune/Hematopoietic, |
| | | | Neural/Sensory |
| HDPML23 | SEQ ID NO: 745 | | Immune/Hematopoietic, |
| | | | Neural/Sensory |
| HDPML23 | SEQ ID NO: 746 | | Immune/Hematopoietic, |
| | | | Neural/Sensory |
| HDPMM88 | SEQ ID NO: 747 | | Cancer |
| HDPMM88 | SEQ ID NO: 748 | | Cancer |
| HDPMM88 | SEQ ID NO: 749 | | Cancer |
| HDPMM88 | SEQ ID NO: 750 | | Cancer |
| HDPMM88 | SEQ ID NO: 751 | | Cancer |
| HDPMM88 | SEQ ID NO: 752 | | Cancer |
| HDPMM88 | SEQ ID NO: 753 | | Cancer |
| HDPMS12 | SEQ ID NO: 754 | | Cancer |
| HDPMS12 | SEQ ID NO: 755 | | Cancer |
| HDPMS12 | SEQ ID NO: 756 | | Cancer |
| HDPMS12 | SEQ ID NO: 757 | | Cancer |
| HDPMS12 | SEQ ID NO: 758 | | Cancer |
| HDPMS12 | SEQ ID NO: 759 | | Cancer |
| HDPAP35 | SEQ ID NO: 760 | | Excretory, |
| | | | Immune/Hematopoietic, |
| | | | Neural/Sensory |
| HDPAP35 | SEQ ID NO: 761 | | Excretory, |
| | | | Immune/Hematopoietic, |
| | | | Neural/Sensory |
| HDPAP35 | SEQ ID NO: 762 | | Excretory, |
| | | | Immune/Hematopoietic, |
| | | | Neural/Sensory |
| HDPAP35 | SEQ ID NO: 763 | | Excretory, |
| | | | Immune/Hematopoietic, |
| | | | Neural/Sensory |
| HDPAQ55 | SEQ ID NO: 764 | | Digestive, |
| | | | Immune/Hematopoietic, |
| | | | Reproductive |
| HDPAQ55 | SEQ ID NO: 765 | | Digestive, |
| | | | Immune/Hematopoietic, |
| | | | Reproductive |
| HDPAQ55 | SEQ ID NO: 766 | | Digestive, |
| | | | Immune/Hematopoietic, |
| | | | Reproductive |
| HDPAQ55 | SEQ ID NO: 767 | | Digestive, |
| | | | Immune/Hematopoietic, |
| | | | Reproductive |
| HKAAV61 | SEQ ID NO: 768 | | Connective/Epithelial |
| HKAAV61 | SEQ ID NO: 769 | | Connective/Epithelial |
| HKAAV61 | SEQ ID NO: 770 | | Connective/Epithelial |
| HDPCJ43 | SEQ ID NO: 771 | | Cancer |
| HDPCJ43 | SEQ ID NO: 772 | | Cancer |
| HDPCJ43 | SEQ ID NO: 773 | | Cancer |
| HDPCJ43 | SEQ ID NO: 774 | | Cancer |
| HKACM93 | SEQ ID NO: 775 | | Cancer |
| HKACM93 | SEQ ID NO: 776 | | Cancer |
| HKACM93 | SEQ ID NO: 777 | | Cancer |
| HKACM93 | SEQ ID NO: 778 | | Cancer |
| HKAFT66 | SEQ ID NO: 779 | | Connective/Epithelial, |
| | | | Digestive, |
| | | | Immune/Hematopoietic |
| HKAFT66 | SEQ ID NO: 780 | | Connective/Epithelial, |
| | | | Digestive, |
| | | | Immune/Hematopoietic |
| HKAFT66 | SEQ ID NO: 781 | | Connective/Epithelial, |
| | | | Digestive, |
| | | | Immune/Hematopoietic |
| HHEMM74 | SEQ ID NO: 782 | | Cancer |
| HHEMM74 | SEQ ID NO: 783 | | Cancer |
| HHEMM74 | SEQ ID NO: 784 | | Cancer |
| HHEMM74 | SEQ ID NO: 785 | | Cancer |
| HAMFC93 | SEQ ID NO: 786 | | Cancer |
| HAMFC93 | SEQ ID NO: 787 | | Cancer |
| HAMFC93 | SEQ ID NO: 788 | | Cancer |
| HSYAZ50 | SEQ ID NO: 789 | | Cancer |
| HSYAZ50 | SEQ ID NO: 790 | | Cancer |
| HSYAZ50 | SEQ ID NO: 791 | | Cancer |
| HSYAZ50 | SEQ ID NO: 792 | | Cancer |
| HLWAX42 | SEQ ID NO: 793 | | Cancer |
| HLWAX42 | SEQ ID NO: 794 | | Cancer |
| HLWAX42 | SEQ ID NO: 795 | | Cancer |
| HLWAZ70 | SEQ ID NO: 796 | | Cancer |
| HLWAZ70 | SEQ ID NO: 797 | | Cancer |
| HLWAZ70 | SEQ ID NO: 798 | | Cancer |
| HLWAZ70 | SEQ ID NO: 799 | | Cancer |
| HLWBG83 | SEQ ID NO: 800 | | Cancer |
| HLWBG83 | SEQ ID NO: 801 | | Cancer |
| HLWBG83 | SEQ ID NO: 802 | | Cancer |
| HLWBG83 | SEQ ID NO: 803 | | Cancer |
| HLWBG83 | SEQ ID NO: 804 | | Cancer |
| HLWBH18 | SEQ ID NO: 805 | | Reproductive |
| HLWBH18 | SEQ ID NO: 806 | | Reproductive |
| HRABS65 | SEQ ID NO: 807 | | Cancer |
| HRABV43 | SEQ ID NO: 808 | | Cancer |
| HRABV43 | SEQ ID NO: 809 | | Cancer |
| HRABV43 | SEQ ID NO: 810 | | Cancer |
| HHEPG23 | SEQ ID NO: 811 | | Cancer |
| HHEPG23 | SEQ ID NO: 812 | | Cancer |
| HHEPG23 | SEQ ID NO: 813 | | Cancer |
| HHEPJ23 | SEQ ID NO: 814 | | Cancer |
| HHEPJ23 | SEQ ID NO: 815 | | Cancer |
| HDPIW06 | SEQ ID NO: 816 | | Digestive, |
| | | | Immune/Hematopoietic, |
| | | | Neural/Sensory |
| HDPIW06 | SEQ ID NO: 817 | | Digestive, |
| | | | Immune/Hematopoietic, |
| | | | Neural/Sensory |
| HDPIW06 | SEQ ID NO: 818 | | Digestive, |
| | | | Immune/Hematopoietic, |
| | | | Neural/Sensory |
| HDPIW06 | SEQ ID NO: 819 | | Digestive, |
| | | | Immune/Hematopoietic, |
| | | | Neural/Sensory |
| HDPIW06 | SEQ ID NO: 820 | | Digestive, |
| | | | Immune/Hematopoietic, |
| | | | Neural/Sensory |
| HDPPA04 | SEQ ID NO: 821 | | Cardiovascular, |
| | | | Connective/Epithelial, |
| | | | Immune/Hematopoietic |
| HDPPA04 | SEQ ID NO: 822 | | Cardiovascular, |
| | | | Connective/Epithelial, |
| | | | Immune/Hematopoietic |
| HDPPA04 | SEQ ID NO: 823 | | Cardiovascular, |
| | | | Connective/Epithelial, |
| | | | Immune/Hematopoietic |
| HDPPN86 | SEQ ID NO: 824 | | Cancer |
| HDPPN86 | SEQ ID NO: 825 | | Cancer |
| HDTEK44 | SEQ ID NO: 826 | | Connective/Epithelial, |
| | | | Immune/Hematopoietic, |
| | | | Rrproductive |
| HDTEK44 | SEQ ID NO: 827 | | Connective/Epithelial, |
| | | | Immune/Hematopoietic, |
| | | | Reproductive |
| HDTEK44 | SEQ ID NO: 828 | | Connective/Epithelial, |
| | | | Immune/Hematopoietic, |
| | | | Reproductive |
| HDTEK44 | SEQ ID NO: 829 | | Connective/Epithelial, |
| | | | Immune/Hematopoietic, |
| | | | Reproductive |
| HOHBL42 | SEQ ID NO: 830 | | Cancer |
| HOHBL42 | SEQ ID NO: 831 | | Cancer |
| HOHBL42 | SEQ ID NO: 832 | | Cancer |
| HOHBL42 | SEQ ID NO: 833 | | Cancer |
| HOHBP82 | SEQ ID NO: 834 | | Musculoskeletal |
| HOHBP82 | SEQ ID NO: 835 | | Musculoskeletal |
| HOHBP82 | SEQ ID NO: 836 | | Musculoskeletal |
| HOHBP82 | SEQ ID NO: 837 | | Musculoskeletal |
| HOHBY44 | SEQ ID NO: 838 | | Cancer |
| HOHBY44 | SEQ ID NO: 839 | | Cancer |
| HOHBY44 | SEQ ID NO: 840 | | Cancer |
| HWBAD01 | SEQ ID NO: 841 | | Immune/Hematopoietic |
| HWBAD01 | SEQ ID NO: 842 | | Immune/Hematopoietic |
| HWBAD01 | SEQ ID NO: 843 | | Immune/Hematopoietic |
| HOHCJ90 | SEQ ID NO: 844 | | Cancer |
| HOHCJ90 | SEQ ID NO: 845 | | Cancer |
| HWABE12 | SEQ ID NO: 846 | | Cancer |
| HWABE12 | SEQ ID NO: 847 | | Cancer |
| HWABE12 | SEQ ID NO: 848 | | Cancer |
| HWBAR14 | SEQ ID NO: 849 | | Cancer |
| HWBAR14 | SEQ ID NO: 850 | | Cancer |
| HWBAR14 | SEQ ID NO: 851 | | Cancer |
| HWBAR14 | SEQ ID NO: 852 | | Cancer |
| HWBAR88 | SEQ ID NO: 853 | | Cancer |
| HWBCH13 | SEQ ID NO: 854 | | Immune/Hematopoietic |
| HWBCH13 | SEQ ID NO: 855 | | Immune/Hematopoietic |
| HWBCH13 | SEQ ID NO: 856 | | Immune/Hematopoietic |
| HWBCH13 | SEQ ID NO: 857 | | Immune/Hematopoietic |
| HWBCM79 | SEQ ID NO: 858 | | Immune/Hematopoietic |
| HWBCV72 | SEQ ID NO: 859 | | Cancer |
| HWBCV72 | SEQ ID NO: 860 | | Cancer |
| HWBCV72 | SEQ ID NO: 861 | | Cancer |
| HWBCV72 | SEQ ID NO: 862 | | Cancer |
| HWBDM62 | SEQ ID NO: 863 | | Endocrine, |
| | | | Immune/Hematopoietic |
| HWBDM62 | SEQ ID NO: 864 | | Endocrine, |
| | | | Immune/Hematopoietic |
| HWBDM62 | SEQ ID NO: 865 | | Endocrine, |
| | | | Immune/Hematopoietic |
| HWBDM62 | SEQ ID NO: 866 | | Endocrine, |
| | | | Immune/Hematopoietic |
| HMTAL77 | SEQ ID NO: 867 | | Cancer |
| HMTAL77 | SEQ ID NO: 868 | | Cancer |
| HDPRH52 | SEQ ID NO: 869 | | Cancer |
| HDPRH52 | SEQ ID NO: 870 | | Cancer |
| HDPSB18 | SEQ ID NO: 871 | | Cancer |
| HDPSB18 | SEQ ID NO: 872 | | Cancer |
| HDPSB18 | SEQ ID NO: 873 | | Cancer |
| HDPSB18 | SEQ ID NO: 874 | | Cancer |
| HDPSH53 | SEQ ID NO: 875 | | Immune/Hematopoietic, |
| | | | Reproductive |
| HDPSH53 | SEQ ID NO: 876 | | Immune/Hematopoietic, |
| | | | Reproductive |
| HDPLO25 | SEQ ID NO: 877 | | Cancer |
| HDPLO25 | SEQ ID NO: 878 | | Cancer |
| HDPLO25 | SEQ ID NO: 879 | | Cancer |
| HDPRN70 | SEQ ID NO: 880 | | Immune/Hematopoietic |
| HDPRN70 | SEQ ID NO: 881 | | Immune/Hematopoietic |
| HDPTW24 | SEQ ID NO: 882 | | Immune/Hematopoietic |
| HDPTW65 | SEQ ID NO: 883 | | Excretory |
| HDPTW65 | SEQ ID NO: 884 | | Excretory |
| HDPTW65 | SEQ ID NO: 885 | | Excretory |
| HDPWN93 | SEQ ID NO: 886 | | Cancer |
| HDPWN93 | SEQ ID NO: 887 | | Cancer |
| HDPWN93 | SEQ ID NO: 888 | | Cancer |
| HDPXY01 | SEQ ID NO: 889 | | Cancer |
| HDPXY01 | SEQ ID NO: 890 | | Cancer |
| HDPXY01 | SEQ ID NO: 891 | | Cancer |
| HDPXY01 | SEQ ID NO: 892 | | Cancer |
| HWHPM16 | SEQ ID NO: 893 | | Cancer |
| HWHPM16 | SEQ ID NO: 894 | | Cancer |
| HLDQA07 | SEQ ID NO: 895 | | Digestive |
| HLDQA07 | SEQ ID NO: 896 | | Digestive |
| HDTFE17 | SEQ ID NO: 897 | | Cancer |
| HDTFE17 | SEQ ID NO: 898 | | Cancer |
| HDTFE17 | SEQ ID NO: 899 | | Cancer |
| HWDAD17 | SEQ ID NO: 900 | | Cancer |
| HWDAD17 | SEQ ID NO: 901 | | Cancer |
| HWEAC77 | SEQ ID NO: 902 | | Connective/Epithelial |
| HWEAC77 | SEQ ID NO: 903 | | Connective/Epithelial |
| HWBEM18 | SEQ ID NO: 904 | | Cancer |
| HWBEM18 | SEQ ID NO: 905 | | Cancer |
| HWBEM18 | SEQ ID NO: 906 | | Cancer |
| HWBFE57 | SEQ ID NO: 907 | | Cancer |
| HWBFE57 | SEQ ID NO: 908 | | Cancer |
| HWBFE57 | SEQ ID NO: 909 | | Cancer |
| HOHDF66 | SEQ ID NO: 910 | | Musculoskeletal |
| HOHDF66 | SEQ ID NO: 911 | | Musculoskeletal |
| HOHDF66 | SEQ ID NO: 912 | | Musculoskeletal |
| HOHDC86 | SEQ ID NO: 913 | | Musculoskeletal |
| HOHDC86 | SEQ ID NO: 914 | | Musculoskeletal |
| HOHDC86 | SEQ ID NO: 915 | | Musculoskeletal |
| HRADO01 | SEQ ID NO: 916 | | Excretory |
| HRADO01 | SEQ ID NO: 917 | | Excretory |
| HRADO01 | SEQ ID NO: 918 | | Excretory |
| HRAEE45 | SEQ ID NO: 919 | | Connective/Epithelial, |
| | | | Excretory, |
| | | | Immune/Hematopoietic |
| HRAEE45 | SEQ ID NO: 920 | | Connective/Epithelial, |
| | | | Excretory, |
| | | | Immune/Hematopoietic |
| HRAEE45 | SEQ ID NO: 921 | | Connective/Epithelial, |
| | | | Excretory, |
| | | | Immune/Hematopoietic |
| HRAEH37 | SEQ ID NO: 922 | | Cancer |
| HRAEH37 | SEQ ID NO: 923 | | Cancer |
| HRAEH37 | SEQ ID NO: 924 | | Cancer |
| HWDAH38 | SEQ ID NO: 925 | | Cancer |
| HWDAH38 | SEQ ID NO: 926 | | Cancer |
| HLWCP78 | SEQ ID NO: 927 | | Cancer |
| HLWCP78 | SEQ ID NO: 928 | | Cancer |
| HLWCP78 | SEQ ID NO: 929 | | Cancer |
| HLWCP78 | SEQ ID NO: 930 | | Cancer |
| HTJML75 | SEQ ID NO: 931 | | Cancer |
| HTJML75 | SEQ ID NO: 932 | | Cancer |
| HTJNX29 | SEQ ID NO: 933 | | Connective/Epithelial, |
| | | | Digestive, |
| | | | Immune/Hematopoietic |
| HTJNX29 | SEQ ID NO: 934 | | Connective/Epithelial, |
| | | | Digestive, |
| | | | Immune/Hematopoietic |
| HTJNX29 | SEQ ID NO: 935 | | Connective/Epithelial, |
| | | | Digestive, |
| | | | Immune/Hematopoietic |
| HHESQ62 | SEQ ID NO: 936 | | Immune/Hematopoietic |
| HHESQ62 | SEQ ID NO: 937 | | Immune/Hematopoietic |
| HHESQ62 | SEQ ID NO: 938 | | Immune/Hematopoietic |
| HHESQ62 | SEQ ID NO: 939 | | Immune/Hematopoietic |
| HHESQ62 | SEQ ID NO: 940 | | Immune/Hematopoietic |
| HDQGO29 | SEQ ID NO: 941 | | Immune/Hematopoietic |
| HDQGO29 | SEQ ID NO: 942 | | Immune/Hematopoietic |
| HDQGO29 | SEQ ID NO: 943 | | Immune/Hematopoietic |
| HDQGO29 | SEQ ID NO: 944 | | Immune/Hematopoietic |
| HDQHY04 | SEQ ID NO: 945 | | Cancer |
| HDQHY04 | SEQ ID NO: 946 | | Cancer |
| HDQHY04 | SEQ ID NO: 947 | | Cancer |
| HBXAB02 | SEQ ID NO: 948 | | Cancer |
| HBXAB02 | SEQ ID NO: 949 | | Cancer |
| HBXAB02 | SEQ ID NO: 950 | | Cancer |
| HCWAU23 | SEQ ID NO: 951 | | Immune/Hematopoietic |
| HCWAU23 | SEQ ID NO: 952 | | Immune/Hematopoietic |
| HCWAU23 | SEQ ID NO: 953 | | Immune/Hematopoietic |
| HBXAM53 | SEQ ID NO: 954 | | Cancer |
| HBXAM53 | SEQ ID NO: 955 | | Cancer |
| HBXAM53 | SEQ ID NO: 956 | | Cancer |
| HCWBP34 | SEQ ID NO: 957 | | Immune/Hematopoietic |
| HCWBP34 | SEQ ID NO: 958 | | Immune/Hematopoietic |
| HCWBP34 | SEQ ID NO: 959 | | Immune/Hematopoietic |
| HBXCT44 | SEQ ID NO: 960 | | Cancer |
| HBXCT44 | SEQ ID NO: 961 | | Cancer |
| HBXCT44 | SEQ ID NO: 962 | | Cancer |
| HBXCT44 | SEQ ID NO: 963 | | Cancer |
| HCWDY64 | SEQ ID NO: 964 | | Excretory, |
| | | | Immune/Hematopoietic |
| HCWDY64 | SEQ ID NO: 965 | | Excretory, |
| | | | Immune/Hematopoietic |
| HCWDY64 | SEQ ID NO: 966 | | Excretory, |
| | | | Immune/Hematopoietic |
| HCWEB58 | SEQ ID NO: 967 | | Cancer |
| HCWEB58 | SEQ ID NO: 968 | | Cancer |
| HBXED80 | SEQ ID NO: 969 | | Immune/Hematopoietic, |
| | | | Neural/Sensory |
| HBXED80 | SEQ ID NO: 970 | | Immune/Hematopoietic, |
| | | | Neural/Sensory |
| HBXED80 | SEQ ID NO: 971 | | Immune/Hematopoietic, |
| | | | Neural/Sensory |
| HBXED80 | SEQ ID NO: 972 | | Immune/Hematopoietic, |
| | | | Neural/Sensory |
| HCWFT79 | SEQ ID NO: 973 | | Immune/Hematopoietic |
| HCWFT79 | SEQ ID NO: 974 | | Immune/Hematopoietic |
| HCWFT79 | SEQ ID NO: 975 | | Immune/Hematopoietic |
| HCWFU77 | SEQ ID NO: 976 | | Cancer |
| HCWFU77 | SEQ ID NO: 977 | | Cancer |
| HCWFU77 | SEQ ID NO: 978 | | Cancer |
| HBXFZ38 | SEQ ID NO: 979 | | Cancer |
| HBXFZ38 | SEQ ID NO: 980 | | Cancer |
| HBXFZ38 | SEQ ID NO: 981 | | Cancer |
| HCUGC55 | SEQ ID NO: 982 | | Immune/Hematopoietic |
| HCUGC55 | SEQ ID NO: 983 | | Immune/Hematopoietic |
| HCUGC55 | SEQ ID NO: 984 | | Immune/Hematopoietic |
| HCWGU37 | SEQ ID NO: 985 | | Immune/Hematopoietic, |
| | | | Neural/Sensory, |
| | | | Reproductive |
| HCWGU37 | SEQ ID NO: 986 | | Immune/Hematopoietic, |
| | | | Neural/Sensory, |
| | | | Reproductive |
| HCWHV88 | SEQ ID NO: 987 | | Digestive, |
| | | | Immune/Hematopoietic, |
| | | | Reproductive |
| HCWHV88 | SEQ ID NO: 988 | | Digestive, |
| | | | Immune/Hematopoietic, |
| | | | Reproductive |
| HCWHX82 | SEQ ID NO: 989 | | Immune/Hematopoietic, |
| | | | Neural/Sensory |
| HCWHX82 | SEQ ID NO: 990 | | Immune/Hematopoietic, |
| | | | Neural/Sensory |
| HCWHX82 | SEQ ID NO: 991 | | Immune/Hematopoietic, |
| | | | Neural/Sensory |
| HCWFZ59 | SEQ ID NO: 992 | | Immune/Hematopoietic |
| HCWFZ59 | SEQ ID NO: 993 | | Immune/Hematopoietic |
| HCWFZ59 | SEQ ID NO: 994 | | Immune/Hematopoietic |
| HCWFZ59 | SEQ ID NO: 995 | | Immune/Hematopoietic |
| HBWCB95 | SEQ ID NO: 996 | | Neural/Sensory |
| HBWCB95 | SEQ ID NO: 997 | | Neural/Sensory |
| HBWCB95 | SEQ ID NO: 998 | | Neural/Sensory |
| HBWBR94 | SEQ ID NO: 999 | | Neural/Sensory |
| HBWBR94 | SEQ ID NO: 1000 | | Neural/Sensory |
| HBWBR94 | SEQ ID NO: 1001 | | Neural/Sensory |
| HBWCF75 | SEQ ID NO: 1002 | | Neural/Sensory |
| HBWCF75 | SEQ ID NO: 1003 | | Neural/Sensory |
| HBWCF75 | SEQ ID NO: 1004 | | Neural/Sensory |
| HBWCM83 | SEQ ID NO: 1005 | | Digestive, |
| | | | Immune/Hematopoietic, |
| | | | Neural/Sensory |
| HBWCM83 | SEQ ID NO: 1006 | | Digestive, |
| | | | Immune/Hematopoietic, |
| | | | Neural/Sensory |
| HBWCM83 | SEQ ID NO: 1007 | | Digestive, |
| | | | Immune/Hematopoietic, |
| | | | Neural/Sensory |
| HBWCM83 | SEQ ID NO: 1008 | | Digestive, |
| | | | Immune/Hematopoietic, |
| | | | Neural/Sensory |
| HRSMQ86 | SEQ ID NO: 1009 | | Cancer |
| HRSMQ86 | SEQ ID NO: 1010 | | Cancer |
| HFCAA91 | SEQ ID NO: 1011 | | Neural/Sensory |
| HFCAA91 | SEQ ID NO: 1012 | | Neural/Sensory |
| HFCAA91 | SEQ ID NO: 1013 | | Neural/Sensory |
| HFCAL39 | SEQ ID NO: 1014 | | Cancer |
| HFCAL39 | SEQ ID NO: 1015 | | Cancer |
| HFCAL39 | SEQ ID NO: 1016 | | Cancer |
| HCEBN44 | SEQ ID NO: 1017 | | Neural/Sensory |
| HCEBN44 | SEQ ID NO: 1018 | | Neural/Sensory |
| HHFCP32 | SEQ ID NO: 1019 | | Cancer |
| HGBAJ60 | SEQ ID NO: 1020 | | Cancer |
| HGBAJ60 | SEQ ID NO: 1021 | | Cancer |
| HHFCW75 | SEQ ID NO: 1022 | | Cardiovascular |
| HHFCW75 | SEQ ID NO: 1023 | | Cardiovascular |
| HHFCW75 | SEQ ID NO: 1024 | | Cardiovascular |
| HHFCZ67 | SEQ ID NO: 1025 | | Cancer |
| HHFCZ67 | SEQ ID NO: 1026 | | Cancer |
| HHFCZ67 | SEQ ID NO: 1027 | | Cancer |
| HHFCZ67 | SEQ ID NO: 1028 | | Cancer |
| HJBAR01 | SEQ ID NO: 1029 | | Cancer |
| HJBAR01 | SEQ ID NO: 1030 | | Cancer |
| HETAR42 | SEQ ID NO: 1031 | | Cancer |
| HETAR42 | SEQ ID NO: 1032 | | Cancer |
| HETAR42 | SEQ ID NO: 1033 | | Cancer |
| HETAR42 | SEQ ID NO: 1034 | | Cancer |
| HETAM53 | SEQ ID NO: 1035 | | Cancer |
| HETAM53 | SEQ ID NO: 1036 | | Cancer |
| HETAM53 | SEQ ID NO: 1037 | | Cancer |
| HETAM53 | SEQ ID NO: 1038 | | Cancer |
| HETAM53 | SEQ ID NO: 1039 | | Cancer |
| HTPBG16 | SEQ ID NO: 1040 | | Digestive, |
| | | | Immune/Hematopoietic |
| HTPBG16 | SEQ ID NO: 1041 | | Digestive, |
| | | | Immune/Hematopoietic |
| HTPBG16 | SEQ ID NO: 1042 | | Digestive, |
| | | | Immune/Hematopoietic |
| HJAAJ58 | SEQ ID NO: 1043 | | Immune/Hematopoietic |
| HJAAJ58 | SEQ ID NO: 1044 | | Immune/Hematopoietic |
| HJAAJ58 | SEQ ID NO: 1045 | | Immune/Hematopoietic |
| HJAAJ58 | SEQ ID NO: 1046 | | Immune/Hematopoietic |
| HSBBT12 | SEQ ID NO: 1047 | | Cancer |
| HSBBT12 | SEQ ID NO: 1048 | | Cancer |
| HSBBTI2 | SEQ ID NO: 1049 | | Cancer |
| HE8MH77 | SEQ ID NO: 1050 | | Immune/Hematopoietic, |
| | | | Mixed Fetal, |
| | | | Neural/Sensory |
| HE8MH77 | SEQ ID NO: 1051 | | Immune/Hematopoietic, |
| | | | Mixed Fetal, |
| | | | Neural/Sensory |
| HE8MH77 | SEQ ID NO: 1052 | | Immune/Hematopoietic, |
| | | | Mixed Fetal, |
| | | | Neural/Sensory |
| HTEDJ85 | SEQ ID NO: 1053 | | Cancer |
| HTEDJ85 | SEQ ID NO: 1054 | | Cancer |
| HTEDJ85 | SEQ ID NO: 1055 | | Cancer |
| HTEDJ85 | SEQ ID NO: 1056 | | Cancer |
| HOVAF78 | SEQ ID NO: 1057 | | Cancer |
| HOVAF78 | SEQ ID NO: 1058 | | Cancer |
| HOVAF78 | SEQ ID NO: 1059 | | Cancer |
| HOVAF78 | SEQ ID NO: 1060 | | Cancer |
| HOVAF78 | SEQ ID NO: 1061 | | Cancer |
| HHGDE24 | SEQ ID NO: 1062 | | Cancer |
| HHGDE24 | SEQ ID NO: 1063 | | Cancer |
| HHGDE24 | SEQ ID NO: 1064 | | Cancer |
| HOUFU35 | SEQ ID NO: 1065 | | Connective/Epithelial |
| HOUFU35 | SEQ ID NO: 1066 | | Connective/Epithelial |
| HOUFU35 | SEQ ID NO: 1067 | | Connective/Epithelial |
| HOUFU35 | SEQ ID NO: 1068 | | Connective/Epithelial |
| HSIGD79 | SEQ ID NO: 1069 | | Cancer |
| HSIGD79 | SEQ ID NO: 1070 | | Cancer |
| HCQCT05 | SEQ ID NO: 1071 | | Digestive, |
| | | | Endocrine, |
| | | | Reproductive |
| HCQCT05 | SEQ ID NO: 1072 | | Digestive, |
| | | | Endocrine, |
| | | | Reproductive |
| HMVDL30 | SEQ ID NO: 1073 | | Cancer |
| HMVDL30 | SEQ ID NO: 1074 | | Cancer |
| HMVDL30 | SEQ ID NO: 1075 | | Cancer |
| HMVDL30 | SEQ ID NO: 1076 | | Cancer |
| HTGGO35 | SEQ ID NO: 1077 | | Cancer |
| HTGGO35 | SEQ ID NO: 1078 | | Cancer |
| HTGGO35 | SEQ ID NO: 1079 | | Cancer |
| HCLBW50 | SEQ ID NO: 1080 | | Cancer |
| HCLBW50 | SEQ ID NO: 1081 | | Cancer |
| HCLBW50 | SEQ ID NO: 1082 | | Cancer |
| HCLBW50 | SEQ ID NO: 1083 | | Cancer |
| HWLEV32 | SEQ ID NO: 1084 | | Cancer |
| HWLEV32 | SEQ ID NO: 1085 | | Cancer |
| HWLEV32 | SEQ ID NO: 1086 | | Cancer |
| HWLEV32 | SEQ ID NO: 1087 | | Cancer |
| HWLFE89 | SEQ ID NO: 1088 | | Cancer |
| HWLFE89 | SEQ ID NO: 1089 | | Cancer |
| HWLFE89 | SEQ ID NO: 1090 | | Cancer |
| HE8PW38 | SEQ ID NO: 1091 | | Neural/Sensory |
| HE8PW38 | SEQ ID NO: 1092 | | Neural/Sensory |
| HE8PW38 | SEQ ID NO: 1093 | | Neural/Sensory |
| HE9RO27 | SEQ ID NO: 1094 | | Connective/Epithelial, |
| | | | Mixed Fetal |
| HE9RO27 | SEQ ID NO: 1095 | | Connective/Epithelial, |
| | | | Mixed Fetal |
| HE9RO27 | SEQ ID NO: 1096 | | Connective/Epithelial, |
| | | | Mixed Fetal |
| HCRPV17 | SEQ ID NO: 1097 | | Cancer |
| HCRPV17 | SEQ ID NO: 1098 | | Cancer |
| HCRPV17 | SEQ ID NO: 1099 | | Cancer |
| HCRPV17 | SEQ ID NO: 1100 | | Cancer |
| HHBGF77 | SEQ ID NO: 1101 | | Cancer |
| HHBGF77 | SEQ ID NO: 1102 | | Cancer |
| HLUDB47 | SEQ ID NO: 1103 | | Cancer |
| HLUDB47 | SEQ ID NO: 1104 | | Cancer |
| HLUDB47 | SEQ ID NO: 1105 | | Cancer |
| HHENZ16 | SEQ ID NO: 1106 | | Cancer |
| HHENZ16 | SEQ ID NO: 1107 | | Cancer |
| HHENZ16 | SEQ ID NO: 1108 | | Cancer |
| HSYBZ44 | SEQ ID NO: 1109 | | Cancer |
| HARNB17 | SEQ ID NO: 1110 | | Cancer |
| HARNB17 | SEQ ID NO: 1111 | | Cancer |
| HARNB17 | SEQ ID NO: 1112 | | Cancer |
| HARNB92 | SEQ ID NO: 1113 | | Cancer |
| HARNB92 | SEQ ID NO: 1114 | | Cancer |
| HARNB92 | SEQ ID NO: 1115 | | Cancer |
| HAMGV47 | SEQ ID NO: 1116 | | Cancer |
| HAMGV47 | SEQ ID NO: 1117 | | Cancer |
| HAMGV47 | SEQ ID NO: 1118 | | Cancer |
| HDTMK50 | SEQ ID NO: 1119 | | Cancer |
| HDTMK50 | SEQ ID NO: 1120 | | Cancer |
| HDTMK50 | SEQ ID NO: 1121 | | Cancer |
| HARBA09 | SEQ ID NO: 1122 | | Cancer |
| HARBA09 | SEQ ID NO: 1123 | | Cancer |
| HARBA09 | SEQ ID NO: 1124 | | Cancer |
| HARBA09 | SEQ ID NO: 1125 | | Cancer |
| HE8OK73 | SEQ ID NO: 1126 | | Mixed Fetal, |
| | | | Neural/Sensory |
| HE8OK73 | SEQ ID NO: 1127 | | Mixed Fetal, |
| | | | Neural/Sensory |
| HE8OK73 | SEQ ID NO: 1128 | | Mixed Fetal, |
| | | | Neural/Sensory |
| HSDJL42 | SEQ ID NO: 1129 | | Cancer |
| HSDJL42 | SEQ ID NO: 1130 | | Cancer |
| HSDJL42 | SEQ ID NO: 1131 | | Cancer |
| HCE2P86 | SEQ ID NO: 1132 | | Cancer |
| HCE2P86 | SEQ ID NO: 1133 | | Cancer |
| HCE2P86 | SEQ ID NO: 1134 | | Cancer |
| HNGNN78 | SEQ ID NO: 1135 | | Cancer |
| HNGNN78 | SEQ ID NO: 1136 | | Cancer |
| HNGNN78 | SEQ ID NO: 1137 | | Cancer |
| HTLHC59 | SEQ ID NO: 1138 | | Digestive, |
| | | | Reproductive |
| HTLHC59 | SEQ ID NO: 1139 | | Digestive, |
| | | | Reproductive |
| HTLJF15 | SEQ ID NO: 1140 | | Immune/Hematopoietic, |
| | | | Reproductive |
| HTLJF15 | SEQ ID NO: 1141 | | Immune/Hematopoietic, |
| | | | Reproductive |
| HTLJF15 | SEQ ID NO: 1142 | | Immune/Hematopoietic, |
| | | | Reproductive |
| HPJCC05 | SEQ ID NO: 1143 | | Reproductive |
| HPJCC05 | SEQ ID NO: 1144 | | Reproductive |
| HPJCC05 | SEQ ID NO: 1145 | | Reproductive |
| HDPVW11 | SEQ ID NO: 1146 | | Cancer |
| HDPVW11 | SEQ ID NO: 1147 | | Cancer |
| HDPWP69 | SEQ ID NO: 1148 | | Cancer |
| HDPWP69 | SEQ ID NO: 1149 | | Cancer |
| HDPWP69 | SEQ ID NO: 1150 | | Cancer |
| HWHHD11 | SEQ ID NO: 1151 | | Cancer |
| HWHHD11 | SEQ ID NO: 1152 | | Cancer |
| HWHHD11 | SEQ ID NO: 1153 | | Cancer |
| HBIMT93 | SEQ ID NO: 1154 | | Cancer |
| HBIMT93 | SEQ ID NO: 1155 | | Cancer |
| HBIMT93 | SEQ ID NO: 1156 | | Cancer |
| HHATA33 | SEQ ID NO: 1157 | | Cancer |
| HHATA33 | SEQ ID NO: 1158 | | Cancer |
| HNTDL21 | SEQ ID NO: 1159 | | Cancer |
| HNTDL21 | SEQ ID NO: 1160 | | Cancer |
| HNTNK95 | SEQ ID NO: 1161 | | Cancer |
| HNTNK95 | SEQ ID NO: 1162 | | Cancer |
| HNTNK95 | SEQ ID NO: 1163 | | Cancer |
| HWEAD64 | SEQ ID NO: 1164 | | Cancer |
| HWEAD64 | SEQ ID NO: 1165 | | Cancer |
| HWLHZ28 | SEQ ID NO: 1166 | | Cancer |
| HWLHZ28 | SEQ ID NO: 1167 | | Cancer |
| HWLHZ28 | SEQ ID NO: 1168 | | Cancer |
| HWLHZ28 | SEQ ID NO: 1169 | | Cancer |
| HWLJE21 | SEQ ID NO: 1170 | | Cancer |
| HWLJE21 | SEQ ID NO: 1171 | | Cancer |
| HWLJE21 | SEQ ID NO: 1172 | | Cancer |
| HPASD51 | SEQ ID NO: 1173 | | Digestive, |
| | | | Excretory, |
| | | | Reproductive |
| HPASD51 | SEQ ID NO: 1174 | | Digestive, |
| | | | Excretory, |
| | | | Reproductive |
| HSICQ15 | SEQ ID NO: 1175 | | Cancer |
| HSICQ15 | SEQ ID NO: 1176 | | Cancer |
| HFEBP27 | SEQ ID NO: 1177 | | Cancer |
| HFEBP27 | SEQ ID NO: 1178 | | Cancer |
| HFEBP27 | SEQ ID NO: 1179 | | Cancer |
| HTOIZ28 | SEQ ID NO: 1180 | | Cancer |
| HTOIZ28 | SEQ ID NO: 1181 | | Cancer |
| HTOIZ28 | SEQ ID NO: 1182 | | Cancer |
| HTOIZ28 | SEQ ID NO: 1183 | | Cancer |
| HCE4L28 | SEQ ID NO: 1184 | | Cancer |
| HCE4L28 | SEQ ID NO: 1185 | | Cancer |
| HCE4L28 | SEQ ID NO: 1186 | | Cancer |
| HCE4L28 | SEQ ID NO: 1187 | | Cancer |
| HFVGM16 | SEQ ID NO: 1188 | | Cancer |
| HFVGM16 | SEQ ID NO: 1189 | | Cancer |
| HPMGR66 | SEQ ID NO: 1190 | | Cancer |
| HPMGR66 | SEQ ID NO: 1191 | | Cancer |
| HLYDU43 | SEQ ID NO: 1192 | | Cancer |
| HLYDU43 | SEQ ID NO: 1193 | | Cancer |
| HPJCK10 | SEQ ID NO: 1194 | | Cancer |
| HPJCK10 | SEQ ID NO: 1195 | | Cancer |
| HT5EK75 | SEQ ID NO: 1196 | | Cancer |
| HT5EK75 | SEQ ID NO: 1197 | | Cancer |
| HT5EK75 | SEQ ID NO: 1198 | | Cancer |
| HWLEZ82 | SEQ ID NO: 1199 | | Cancer |
| HWLEZ82 | SEQ ID NO: 1200 | | Cancer |
| HWLEZ82 | SEQ ID NO: 1201 | | Cancer |
| HWLEZ82 | SEQ ID NO: 1202 | | Cancer |
| HDRMB11 | SEQ ID NO: 1203 | | Digestive |
| HDRMB11 | SEQ ID NO: 1204 | | Digestive |
| HDRMB11 | SEQ ID NO: 1205 | | Digestive |
| HCRNC80 | SEQ ID NO: 1206 | | Cancer |
| HCRNC80 | SEQ ID NO: 1207 | | Cancer |
| HCRNC80 | SEQ ID NO: 1208 | | Cancer |
| HCRNF14 | SEQ ID NO: 1209 | | Cancer |
| HCRNF14 | SEQ ID NO: 1210 | | Cancer |
| HCRNF14 | SEQ ID NO: 1211 | | Cancer |
| HE9PF45 | SEQ ID NO: 1212 | | Cancer |
| HE9PF45 | SEQ ID NO: 1213 | | Cancer |
| HE9PF45 | SEQ ID NO: 1214 | | Cancer |
| HISEN93 | SEQ ID NO: 1215 | | Cancer |
| HISEN93 | SEQ ID NO: 1216 | | Cancer |
| HISEN93 | SEQ ID NO: 1217 | | Cancer |
| HODEA51 | SEQ ID NO: 1218 | | Cancer |
| HODEA51 | SEQ ID NO: 1219 | | Cancer |
| HODEA51 | SEQ ID NO: 1220 | | Cancer |
| HODEA51 | SEQ ID NO: 1221 | | Cancer |
| HUSJN32 | SEQ ID NO: 1222 | | Cancer |
| HUSJN32 | SEQ ID NO: 1223 | | Cancer |
| HUSJN32 | SEQ ID NO: 1224 | | Cancer |
| HNGNW50 | SEQ ID NO: 1225 | | Immune/Hematopoietic, |
| | | | Mixed Fetal, |
| | | | Reproductive |
| HNGNW50 | SEQ ID NO: 1226 | | Immune/Hematopoietic, |
| | | | Mixed Fetal, |
| | | | Reproductive |
| HNGNW50 | SEQ ID NO: 1227 | | Immune/Hematopoietic, |
| | | | Mixed Fetal, |
| | | | Reproductive |
| HUVFB80 | SEQ ID NO: 1228 | | Cancer |
| HUVFB80 | SEQ ID NO: 1229 | | Cancer |
| HFIDQ92 | SEQ ID NO: 1230 | | Cancer |
| HFIDQ92 | SEQ ID NO: 1231 | | Cancer |
| HFIDQ92 | SEQ ID NO: 1232 | | Cancer |
| HTLJC07 | SEQ ID NO: 1233 | | Immune/Hematopoietic, |
| | | | Neural/Sensory, |
| | | | Reproductive |
| HTLJC07 | SEQ ID NO: 1234 | | Immune/Hematopoietic, |
| | | | Neural/Sensory, |
| | | | Reproductive |
| HTLJC07 | SEQ ID NO: 1235 | | Immune/Hematopoietic, |
| | | | Neural/Sensory, |
| | | | Reproductive |
| HMSOW51 | SEQ ID NO: 1236 | | Cancer |
| HMSOW51 | SEQ ID NO: 1237 | | Cancer |
| HPJEZ38 | SEQ ID NO: 1238 | | Cancer |
| HPJEZ38 | SEQ ID NO: 1239 | | Cancer |
| HPJEZ38 | SEQ ID NO: 1240 | | Cancer |
| HTAGN51 | SEQ ID NO: 1241 | | Immune/Hematopoietic, |
| | | | Neural/Sensory, |
| | | | Reproductive |
| HTAGN51 | SEQ ID NO: 1242 | | Immune/Hematopoietic, |
| | | | Neural/Sensory, |
| | | | Reproductive |
| HHFLH45 | SEQ ID NO: 1243 | | Cardiovascular, |
| | | | Reproductive |
| HHFLH45 | SEQ ID NO: 1244 | | Cardiovascular, |
| | | | Reproductive |
| HHFLH45 | SEQ ID NO: 1245 | | Cardiovascular, |
| | | | Reproductive |
| HFKLE15 | SEQ ID NO: 1246 | | Cancer |
| HFKLE15 | SEQ ID NO: 1247 | | Cancer |
| HNSAA27 | SEQ ID NO: 1248 | | Digestive |
| HNSAA27 | SEQ ID NO: 1249 | | Digestive |
| HUVFY29 | SEQ ID NO: 1250 | | Cancer |
| HUVFY29 | SEQ ID NO: 1251 | | Cancer |
| HAVUR23 | SEQ ID NO: 1252 | | Neural/Sensory |
| HAVUR23 | SEQ ID NO: 1253 | | Neural/Sensory |
| HTPIH83 | SEQ ID NO: 1254 | | Digestive, |
| | | | Reproductive |
| HTPIH83 | SEQ ID NO: 1255 | | Digestive, |
| | | | Reproductive |
| HTPIH83 | SEQ ID NO: 1256 | | Digestive, |
| | | | Reproductive |
| HUCNC61 | SEQ ID NO: 1257 | | Cancer |
| HIDAF73 | SEQ ID NO: 1258 | | Cancer |
| HIDAF73 | SEQ ID NO: 1259 | | Cancer |
| HIDAF73 | SEQ ID NO: 1260 | | Cancer |
| HOFMA42 | SEQ ID NO: 1261 | | Reproductive |
| HOFMA42 | SEQ ID NO: 1262 | | Reproductive |
| HKABW11 | SEQ ID NO: 1263 | | Cancer |
| HKABW11 | SEQ ID NO: 1264 | | Cancer |
| HWBAO29 | SEQ ID NO: 1265 | | Immune/Hematopoietic, |
| | | | Reproductive |
| HWBAO29 | SEQ ID NO: 1266 | | Immune/Hematopoietic, |
| | | | Reproductive |
| HWBAO29 | SEQ ID NO: 1267 | | Immune/Hematopoietic, |
| | | | Reproductive |
| HDPTM61 | SEQ ID NO: 1268 | | Digestive, |
| | | | Immune/Hematopoietic |
| HDPTM61 | SEQ ID NO: 1269 | | Digestive, |
| | | | Immune/Hematopoietic |
| HKAHL26 | SEQ ID NO: 1270 | | Cancer |
| HKAHL26 | SEQ ID NO: 1271 | | Cancer |
| HDQHC29 | SEQ ID NO: 1272 | | Cancer |
| HDQHQ91 | SEQ ID NO: 1273 | | Cancer |
| HDQHQ91 | SEQ ID NO: 1274 | | Cancer |
| HDQHQ91 | SEQ ID NO: 1275 | | Cancer |
| HDTLR06 | SEQ ID NO: 1276 | | Cancer |
| HDTLR06 | SEQ ID NO: 1277 | | Cancer |
| HNTDE84 | SEQ ID NO: 1278 | | Cancer |
| HNTDE84 | SEQ ID NO: 1279 | | Cancer |
| HWAFT87 | SEQ ID NO: 1280 | | Cardiovascular, |
| | | | Immune/Hematopoietic |
| HWAFT87 | SEQ ID NO: 1281 | | Cardiovascular, |
| | | | Immune/Hematopoietic |
| HWAFT87 | SEQ ID NO: 1282 | | Cardiovascular, |
| | | | Immune/Hematopoietic |
| HOGCE48 | SEQ ID NO: 1283 | | Cancer |
| HOGCE48 | SEQ ID NO: 1284 | | Cancer |
| HBINS58 | SEQ ID NO: 1285 | | Connective/Epithelial, |
| | | | Reproductive |
| HBINS58 | SEQ ID NO: 1286 | | Connective/Epithelial, |
| | | | Reproductive |
| HHAUQ28 | SEQ ID NO: 1287 | | Cancer |
| HHAUQ28 | SEQ ID NO: 1288 | | Cancer |
| HBIOH81 | SEQ ID NO: 1289 | | Cancer |
| HBIOH81 | SEQ ID NO: 1290 | | Cancer |
| HOGDP46 | SEQ ID NO: 1291 | | Cancer |
| HOGDP46 | SEQ ID NO: 1292 | | Cancer |
| HWHIH10 | SEQ ID NO: 1293 | | Cancer |
| HWHIH10 | SEQ ID NO: 1294 | | Cancer |
| HCWCT62 | SEQ ID NO: 1295 | | Immune/Hematopoietic |
| HCWCT62 | SEQ ID NO: 1296 | | Immune/Hematopoietic |
| HCWCT62 | SEQ ID NO: 1297 | | Immune/Hematopoietic |
| HBXCL50 | SEQ ID NO: 1298 | | Digestive, |
| | | | Excretory, |
| | | | Neural/Sensory |
| HBXCL50 | SEQ ID NO: 1299 | | Digestive, |
| | | | Excretory, |
| | | | Neural/Sensory |
| HACAA29 | SEQ ID NO: 1300 | | Cancer |
| HACAA29 | SEQ ID NO: 1301 | | Cancer |
| HAJAR23 | SEQ ID NO: 1302 | | Cancer |
| HAJAR23 | SEQ ID NO: 1303 | | Cancer |
| HAJAR23 | SEQ ID NO: 1304 | | Cancer |
| HDPQN12 | SEQ ID NO: 1305 | | Cancer |
| HDPQN12 | SEQ ID NO: 1306 | | Cancer |
| HDQFN31 | SEQ ID NO: 1307 | | Cancer |
| HDQFN31 | SEQ ID NO: 1308 | | Cancer |
| HDQIH54 | SEQ ID NO: 1309 | | Immune/Hematopoietic |
| HDQIH54 | SEQ ID NO: 1310 | | Immune/Hematopoietic |
| HETKL27 | SEQ ID NO: 1311 | | Cancer |
| HETKL27 | SEQ ID NO: 1312 | | Cancer |
| HETKL27 | SEQ ID NO: 1313 | | Cancer |
| HETKL27 | SEQ ID NO: 1314 | | Cancer |
| HFIHQ89 | SEQ ID NO: 1315 | | Cancer |
| HFIHQ89 | SEQ ID NO: 1316 | | Cancer |
| HFKHW50 | SEQ ID NO: 1317 | | Cancer |
| HFKHW50 | SEQ ID NO: 1318 | | Cancer |
| HFKHW50 | SEQ ID NO: 1319 | | Cancer |
| HMEJL08 | SEQ ID NO: 1320 | | Cancer |
| HMEJL08 | SEQ ID NO: 1321 | | Cancer |
| HMEJL08 | SEQ ID NO: 1322 | | Cancer |
| HMSCT72 | SEQ ID NO: 1323 | | Connective/Epithelial, |
| | | | Immune/Hematopoietic |
| HMSCT72 | SEQ ID NO: 1324 | | Connective/Epithelial, |
| | | | Immune/Hematopoietic |
| HMSCT72 | SEQ ID NO: 1325 | | Connective/Epithelial, |
| | | | Immune/Hematopoietic |
| HPJEX20 | SEQ ID NO: 1326 | | Immune/Hematopoietic, |
| | | | Reproductive |
| HPJEX20 | SEQ ID NO: 1327 | | Immune/Hematopoietic, |
| | | | Reproductive |
| HPJEX20 | SEQ ID NO: 1328 | | Immune/Hematopoietic, |
| | | | Reproductive |
| HPJEX20 | SEQ ID NO: 1329 | | Immune/Hematopoietic, |
| | | | Reproductive |
| HSLGM21 | SEQ ID NO: 1330 | | Cancer |
| HSLGM21 | SEQ ID NO: 1331 | | Cancer |
| HSLHI86 | SEQ ID NO: 1332 | | Cancer |
| HSLHI86 | SEQ ID NO: 1333 | | Cancer |
| HSLHI86 | SEQ ID NO: 1334 | | Cancer |
| HSLHI86 | SEQ ID NO: 1335 | | Cancer |
| HUCNP80 | SEQ ID NO: 1336 | | Cancer |
| HUCNP80 | SEQ ID NO: 1337 | | Cancer |
| HBINK72 | SEQ ID NO: 1338 | | Cancer |
| HBINK72 | SEQ ID NO: 1339 | | Cancer |
| HBINK72 | SEQ ID NO: 1340 | | Cancer |
| HIABC55 | SEQ ID NO: 1341 | | Cancer |
| HIABC55 | SEQ ID NO: 1342 | | Cancer |
| HIABC55 | SEQ ID NO: 1343 | | Cancer |
| HIABC55 | SEQ ID NO: 1344 | | Cancer |
| HGBAR55 | SEQ ID NO: 1345 | | Cancer |
| HGBAR55 | SEQ ID NO: 1346 | | Cancer |
| HGBAR55 | SEQ ID NO: 1347 | | Cancer |
| HE2FE45 | SEQ ID NO: 1348 | | Cancer |
| HE2FE45 | SEQ ID NO: 1349 | | Cancer |
| HE2FE45 | SEQ ID NO: 1350 | | Cancer |
| HMRAD54 | SEQ ID NO: 1351 | | Cancer |
| HMRAD54 | SEQ ID NO: 1352 | | Cancer |
| HMRAD54 | SEQ ID NO: 1353 | | Cancer |
| HCEFB80 | SEQ ID NO: 1354 | | Cancer |
| HCEFB80 | SEQ ID NO: 1355 | | Cancer |
| HFTBN23 | SEQ ID NO: 1356 | | Cancer |
| HFTBN23 | SEQ ID NO: 1357 | | Cancer |
| HFTBN23 | SEQ ID NO: 1358 | | Cancer |
| HFTBQ52 | SEQ ID NO: 1359 | | Cancer |
| HFTBQ52 | SEQ ID NO: 1360 | | Cancer |
| HMEEJ79 | SEQ ID NO: 1361 | | Cardiovascular, |
| | | | Neural/Sensory, |
| | | | Reproductive |
| HMEEJ79 | SEQ ID NO: 1362 | | Cardiovascular, |
| | | | Neural/Sensory, |
| | | | Reproductive |
| HROAJ39 | SEQ ID NO: 1363 | | Cancer |
| HROAJ39 | SEQ ID NO: 1364 | | Cancer |
| HROAJ39 | SEQ ID NO: 1365 | | Cancer |
| HFEBV76 | SEQ ID NO: 1366 | | Cancer |
| HFEBV76 | SEQ ID NO: 1367 | | Cancer |
| HTADC09 | SEQ ID NO: 1368 | | Cancer |
| HTADC09 | SEQ ID NO: 1369 | | Cancer |
| HFXBJ12 | SEQ ID NO: 1370 | | Neural/Sensory |
| HFXBJ12 | SEQ ID NO: 1371 | | Neural/Sensory |
| HFXBJ12 | SEQ ID NO: 1372 | | Neural/Sensory |
| HMHBN86 | SEQ ID NO: 1373 | | Cancer |
| HMHBN86 | SEQ ID NO: 1374 | | Cancer |
| HMHBN86 | SEQ ID NO: 1375 | | Cancer |
| HFKFL92 | SEQ ID NO: 1376 | | Cancer |
| HFKFL92 | SEQ ID NO: 1377 | | Cancer |
| HFKFL92 | SEQ ID NO: 1378 | | Cancer |
| HASAW52 | SEQ ID NO: 1379 | | Cancer |
| HTLDT76 | SEQ ID NO: 1380 | | Cardiovascular, |
| | | | Neural/Sensory, |
| | | | Reproductive |
| HTLDT76 | SEQ ID NO: 1381 | | Cardiovascular, |
| | | | Neural/Sensory, |
| | | | Reproductive |
| HTLDT76 | SEQ ID NO: 1382 | | Cardiovascular, |
| | | | Neural/Sensory, |
| | | | Reproductive |
| HTLEC34 | SEQ ID NO: 1383 | | Immune/Hematopoiefic, |
| | | | Neural/Sensory, |
| | | | Reproductive |
| HTLEC34 | SEQ ID NO: 1384 | | Immune/Hematopoietic, |
| | | | Neural/Sensory, |
| | | | Reproductive |
| HNHFB60 | SEQ ID NO: 1385 | | Immune/Hemaropoietic |
| HNHFB60 | SEQ ID NO: 1386 | | Immune/Hematopoietic |
| HNHFB60 | SEQ ID NO: 1387 | | Immune/Hematopoietic |
| H2CBK33 | SEQ ID NO: 1388 | | Cancer |
| H2CBK33 | SEQ ID NO: 1389 | | Cancer |
| H2CBK33 | SEQ ID NO: 1390 | | Cancer |
| HNGEY29 | SEQ ID NO: 1391 | | Cancer |
| HNGEY29 | SEQ ID NO: 1392 | | Cancer |
| HUSFE58 | SEQ ID NO: 1393 | | Cancer |
| HUSFE58 | SEQ ID NO: 1394 | | Cancer |
| HMSHS36 | SEQ ID NO: 1395 | | Immune/Hematopoietic |
| HMSHS36 | SEQ ID NO: 1396 | | Immune/Hematopoietic |
| HMSKC10 | SEQ ID NO: 1397 | | Immune/Hematopoietic |
| HMSKC10 | SEQ ID NO: 1398 | | Immune/Hematopoietic |
| HMSKC10 | SEQ ID NO: 1399 | | Immune/Hematopoietic |
| HSLGU75 | SEQ ID NO: 1400 | | Cancer |
| HSLGU75 | SEQ ID NO: 1401 | | Cancer |
| HSLGU75 | SEQ ID NO: 1402 | | Cancer |
| HDABU01 | SEQ ID NO: 1403 | | Cancer |
| HDABU01 | SEQ ID NO: 1404 | | Cancer |
| HDABU01 | SEQ ID NO: 1405 | | Cancer |
| HADGD17 | SEQ ID NO: 1406 | | Connective/Epithelial |
| HADGD17 | SEQ ID NO: 1407 | | Connective/Epithelial |
| HADGD17 | SEQ ID NO: 1408 | | Connective/Epithelial |
| HFIUE67 | SEQ ID NO: 1409 | | Cancer |
| HKGAM29 | SEQ ID NO: 1410 | | Cancer |
| HACBD86 | SEQ ID NO: 1411 | | Cancer |
| HACBD86 | SEQ ID NO: 1412 | | Cancer |
| HACBD86 | SEQ ID NO: 1413 | | Cancer |
| HEGAK23 | SEQ ID NO: 1414 | | Cancer |
| HEGAK23 | SEQ ID NO: 1415 | | Cancer |
| HEGAK23 | SEQ ID NO: 1416 | | Cancer |
| HEGAK23 | SEQ ID NO: 1417 | | Cancer |
| HCHAR90 | SEQ ID NO: 1418 | | Cancer |
| HCHAR90 | SEQ ID NO: 1419 | | Cancer |
| HCHAR90 | SEQ ID NO: 1420 | | Cancer |
| HLYCK27 | SEQ ID NO: 1421 | | Immune/Hematopoietic |
| HMVBP38 | SEQ ID NO: 1422 | | Cancer |
| HMVBP38 | SEQ ID NO: 1423 | | Cancer |
| HMVBP38 | SEQ ID NO: 1424 | | Cancer |
| HFACI31 | SEQ ID NO: 1425 | | Neural/Sensory |
| HFACI31 | SEQ ID NO: 1426 | | Neural/Sensory |
| HFACI31 | SEQ ID NO: 1427 | | Neural/Sensory |
| HBJKC04 | SEQ ID NO: 1428 | | Immune/Hematopoietic |
| HBJKC04 | SEQ ID NO: 1429 | | Immune/Hematopoietic |
| HBJKC04 | SEQ ID NO: 1430 | | Immune/Hematopoietic |
| HBJIT60 | SEQ ID NO: 1431 | | Immune/Hematopoietic |
| HBJIT60 | SEQ ID NO: 1432 | | Immune/Hematopoietic |
| HBJIT60 | SEQ ID NO: 1433 | | Immune/Hematopoietic |
| HPJBK03 | SEQ ID NO: 1434 | | Cancer |
| HPJBK03 | SEQ ID NO: 1435 | | Cancer |
| HPJCL22 | SEQ ID NO: 1436 | | Cancer |
| HPJCL22 | SEQ ID NO: 1437 | | Cancer |
| HPJCL22 | SEQ ID NO: 1438 | | Cancer |
| HTWJB71 | SEQ ID NO: 1439 | | Immune/Hematopoietic, |
| | | | Neural/Sensory |
| HNTOE45 | SEQ ID NO: 1440 | | Cancer |
| HNTOE45 | SEQ ID NO: 1441 | | Cancer |
| HNTRW30 | SEQ ID NO: 1442 | | Digestive, |
| | | | Immune/Hematopoietic, |
| | | | Mixed Fetal |
| HNTRW30 | SEQ ID NO: 1443 | | Digestive, |
| | | | Immune/Hematopoietic, |
| | | | Mixed Fetal |
| HCHPU32 | SEQ ID NO: 1444 | | Cancer |
| HCHPU32 | SEQ ID NO: 1445 | | Cancer |
| HCHPU32 | SEQ ID NO: 1446 | | Cancer |
| HGCNC48 | SEQ ID NO: 1447 | | Reproductive |
| HGCNC48 | SEQ ID NO: 1448 | | Reproductive |
| HLTHO84 | SEQ ID NO: 1449 | | Cancer |
| HSLIA81 | SEQ ID NO: 1450 | | Cancer |
| HSLIA81 | SEQ ID NO: 1451 | | Cancer |
| HSLIA81 | SEQ ID NO: 1452 | | Cancer |
| HSLIA81 | SEQ ID NO: 1453 | | Cancer |
| HBFMA07 | SEQ ID NO: 1454 | | Cancer |
| HBODE48 | SEQ ID NO: 1455 | | Digestive, |
| | | | Excretory, |
| | | | Immune/Hematopoietic |
| HBODE48 | SEQ ID NO: 1456 | | Digestive, |
| | | | Excretory, |
| | | | Immune/Hematopoietic |
| HBODE48 | SEQ ID NO: 1457 | | Digestive, |
| | | | Excretory, |
| | | | Immune/Hematopoietic |
| HBODE48 | SEQ ID NO: 1458 | | Digestive, |
| | | | Excretory, |
| | | | Immune/Hematopoietic |
| HCRME12 | SEQ ID NO: 1459 | | Cancer |
| HCRME12 | SEQ ID NO: 1460 | | Cancer |
| HBODQ16 | SEQ ID NO: 1461 | | Cancer |
| HBODQ16 | SEQ ID NO: 1462 | | Cancer |
| HASMB80 | SEQ ID NO: 1463 | | Cancer |
| HASMB80 | SEQ ID NO: 1464 | | Cancer |
| HBOEG11 | SEQ ID NO: 1465 | | Cancer |
| HBOEG11 | SEQ ID NO: 1466 | | Cancer |
| HCRNU76 | SEQ ID NO: 1467 | | Cancer |
| HCRNU76 | SEQ ID NO: 1468 | | Cancer |
| HAPSQ21 | SEQ ID NO: 1469 | | Reproductive, |
| | | | Respiratory |
| HAPSQ21 | SEQ ID NO: 1470 | | Reproductive, |
| | | | Respiratory |
| HAPSQ21 | SEQ ID NO: 1471 | | Reproductive, |
| | | | Respiratory |
| HWLNF33 | SEQ ID NO: 1472 | | Cancer |
| HWLNF33 | SEQ ID NO: 1473 | | Cancer |
| HE8QO53 | SEQ ID NO: 1474 | | Cancer |
| HE8QO53 | SEQ ID NO: 1475 | | Cancer |
| HE8QV67 | SEQ ID NO: 1476 | | Cancer |
| HE8QV67 | SEQ ID NO: 1477 | | Cancer |
| HE8TB68 | SEQ ID NO: 1478 | | Cancer |
| HE8TY90 | SEQ ID NO: 1479 | | Cancer |
| HE8TY90 | SEQ ID NO: 1480 | | Cancer |
| HE8TY90 | SEQ ID NO: 1481 | | Cancer |
| HE8TY90 | SEQ ID NO: 1482 | | Cancer |
| HETLM70 | SEQ ID NO: 1483 | | Digestive, |
| | | | Excretory, |
| | | | Reproductive |
| HETLM70 | SEQ ID NO: 1484 | | Digestive, |
| | | | Excretory, |
| | | | Reproductive |
| HETLM70 | SEQ ID NO: 1485 | | Digestive, |
| | | | Excretory, |
| | | | Reproductive |
| HISES66 | SEQ ID NO: 1486 | | Digestive, |
| | | | Reproductive |
| HISES66 | SEQ ID NO: 1487 | | Digestive, |
| | | | Reproductive |
| HISES66 | SEQ ID NO: 1488 | | Digestive, |
| | | | Reproductive |
| HTXKV29 | SEQ ID NO: 1489 | | Cancer |
| HTXKV29 | SEQ ID NO: 1490 | | Cancer |
| HTXKV29 | SEQ ID NO: 1491 | | Cancer |
| HTXLH48 | SEQ ID NO: 1492 | | Immune/Hematopoietic |
| HTXLH48 | SEQ ID NO: 1493 | | Immune/Hematopoietic |
| HTXLH48 | SEQ ID NO: 1494 | | Immune/Hematopoietic |
| HTEMD27 | SEQ ID NO: 1495 | | Cancer |
| HTEMD27 | SEQ ID NO: 1496 | | Cancer |
| HTEME02 | SEQ ID NO: 149T | | Cancer |
| HTEME02 | SEQ ID NO: 1498 | | Cancer |
| HTEME02 | SEQ ID NO: 1499 | | Cancer |
| HNHLD23 | SEQ ID NO: 1500 | | Immune/Hematopoietic |
| HETLT82 | SEQ ID NO: 1501 | | Immune/Hematopoietic, |
| | | | Reproductive |
| HETLT82 | SEQ ID NO: 1502 | | Immune/Hematopoietic, |
| | | | Reproductive |
| HETLT82 | SEQ ID NO: 1503 | | Immune/Hematopoietic, |
| | | | Reproductive |
| HNGLH60 | SEQ ID NO: 1504 | | Immune/Hematopoietic, |
| | | | Musculoskeletal |
| HNGLH60 | SEQ ID NO: 1505 | | Immune/Hematopoietic, |
| | | | Musculoskeletal |
| HNOLH60 | SEQ ID NO: 1506 | | Immune/Hematopoietic, |
| | | | Musculoskeletal |
| HNHPG05 | SEQ ID NO: 1507 | | Immune/Hematopoietic |
| HNHPG05 | SEQ ID NO: 1508 | | Immune/Hematopoietic |
| HNHPG05 | SEQ ID NO: 1509 | | Immune/Hematopoietic |
| HUSIY89 | SEQ ID NO: 1510 | | Cardiovascular, |
| | | | Immune/Hematopoietic |
| HUSIY89 | SEQ ID NO: 1511 | | Cardiovascular, |
| | | | Immune/Hematopoietic |
| HUSJM25 | SEQ ID NO: 1512 | | Cancer |
| HUSJM25 | SEQ ID NO: 1513 | | Cancer |
| HTXNL31 | SEQ ID NO: 1514 | | Digestive, |
| | | | Immune/Hematopoietic, |
| | | | Reproductive |
| HTXNL31 | SEQ ID NO: 1515 | | Digestive, |
| | | | Immune/Hematopoietic, |
| | | | Reproductive |
| HBGNQ12 | SEQ ID NO: 1516 | | Cancer |
| HBGNQ12 | SEQ ID NO: 1517 | | Cancer |
| HNGNS74 | SEQ ID NO: 1518 | | Cancer |
| HNGNS74 | SEQ ID NO: 1519 | | Cancer |
| HNGOD80 | SEQ ID NO: 1520 | | Cancer |
| HNGOD80 | SEQ ID NO: 1521 | | Cancer |
| HODHK19 | SEQ ID NO: 1522 | | Reproductive |
| HODHK19 | SEQ ID NO: 1523 | | Reproductive |
| HODHK19 | SEQ ID NO: 1524 | | Reproductive |
| HTLHR26 | SEQ ID NO: 1525 | | Immune/Hematopoieric, |
| | | | Reproductive |
| HTLHR26 | SEQ ID NO: 1526 | | Immune/Hematopoietic, |
| | | | Reproductive |
| HTLHR26 | SEQ ID NO: 1527 | | Immune/Hematopoietic, |
| | | | Reproductive |
| HUSZS75 | SEQ ID NO: 1528 | | Cancer |
| HUSZS75 | SEQ ID NO: 1529 | | Cancer |
| HLQDY81 | SEQ ID NO: 1530 | | Cardiovascular, |
| | | | Digestive, |
| | | | Musculoskeletal |
| HBGNU56 | SEQ ID NO: 1531 | | Cancer |
| HBGNU56 | SEQ ID NO: 1532 | | Cancer |
| HODGL52 | SEQ ID NO: 1533 | | Cancer |
| HODGL52 | SEQ ID NO: 1534 | | Cancer |
| HTXNV67 | SEQ ID NO: 1535 | | Cancer |
| HTXNV67 | SEQ ID NO: 1536 | | Cancer |
| HTXNV67 | SEQ ID NO: 1537 | | Cancer |
| HOCNE30 | SEQ ID NO: 1538 | | Digestive, |
| | | | Musculoskeletal, |
| | | | Neural/Sensory |
| HOCNE30 | SEQ ID NO: 1539 | | Digestive, |
| | | | Musculoskeletal, |
| | | | Neural/Sensory |
| HOCNE30 | SEQ ID NO: 1540 | | Digestive, |
| | | | Musculoskeletal, |
| | | | Neural/Sensory |
| HMSOC30 | SEQ ID NO: 1541 | | Cancer |
| HMSOC30 | SEQ ID NO: 1542 | | Cancer |
| HWMAF61 | SEQ ID NO: 1543 | | Digestive |
| HWMAF61 | SEQ ID NO: 1544 | | Digestive |
| HWMAF61 | SEQ ID NO: 1545 | | Digestive |
| HWMAF61 | SEQ ID NO: 1546 | | Digestive |
| HWMAF61 | SEQ ID NO: 1547 | | Digestive |
| HWMAH36 | SEQ ID NO: 1548 | | Immune/Hematopoietic |
| HWMAH36 | SEQ ID NO: 1549 | | Immune/Hematopoietic |
| HXOAC69 | SEQ ID NO: 1550 | | Cancer |
| HXOAC69 | SEQ ID NO: 1551 | | Cancer |
| HPJDA23 | SEQ ID NO: 1552 | | Mixed Fetal, |
| | | | Neural/Sensory, |
| | | | Reproductive |
| HPJDA23 | SEQ ID NO: 1553 | | Mixed Fetal, |
| | | | Neural/Sensory, |
| | | | Reproductive |
| HPJEE14 | SEQ ID NO: 1554 | | Reproductive |
| HPJEE14 | SEQ ID NO: 1555 | | Reproductive |
| HPJEG57 | SEQ ID NO: 1556 | | Reproductive |
| HPJEG57 | SEQ ID NO: 1557 | | Reproductive |
| HPJEG57 | SEQ ID NO: 1558 | | Reproductive |
| HPJEV11 | SEQ ID NO: 1559 | | Cancer |
| HTTKT43 | SEQ ID NO: 1560 | | Cancer |
| HTTKT43 | SEQ ID NO: 1561 | | Cancer |
| HTTKT43 | SEQ ID NO: 1562 | | Cancer |
| HHFKM76 | SEQ ID NO: 1563 | | Cancer |
| HHFKM76 | SEQ ID NO: 1564 | | Cancer |
| HHFKM76 | SEQ ID NO: 1565 | | Cancer |
| HHFML08 | SEQ ID NO: 1566 | | Cardiovascular, |
| | | | Immune/Hematopoietic, |
| | | | Mixed Fetal |
| HHFML08 | SEQ ID NO: 1567 | | Cardiovascular, |
| | | | Immune/Hematopoietic, |
| | | | Mixed Fetal |
| HHFML08 | SEQ ID NO: 1568 | | Cardiovascular, |
| | | | Immune/Hematopoietic, |
| | | | Mixed Fetal |
| HTPFX69 | SEQ ID NO: 1569 | | Cancer |
| HTPFX69 | SEQ ID NO: 1570 | | Cancer |
| HTPFX69 | SEQ ID NO: 1571 | | Cancer |
| HTPFX69 | SEQ ID NO: 1572 | | Cancer |
| HFKLX38 | SEQ ID NO: 1573 | | Excretory, |
| | | | Respiratory |
| HFKLX38 | SEQ ID NO: 1574 | | Excretory, |
| | | | Respiratory |
| HFKLX38 | SEQ ID NO: 1575 | | Excretory, |
| | | | Respiratory |
| HFKME15 | SEQ ID NO: 1576 | | Excretory |
| HFKME15 | SEQ ID NO: 1577 | | Excretory |
| HUVFH14 | SEQ ID NO: 1578 | | Cancer |
| HUVFH14 | SEQ ID NO: 1579 | | Cancer |
| HUVFH14 | SEQ ID NO: 1580 | | Cancer |
| HE2KK74 | SEQ ID NO: 1581 | | Cancer |
| HE2KK74 | SEQ ID NO: 1582 | | Cancer |
| HE2KK74 | SEQ ID NO: 1583 | | Cancer |
| HMALI42 | SEQ ID NO: 1584 | | Immune/Hematopoietic |
| HE2LW65 | SEQ ID NO: 1585 | | Cancer |
| HE2LW65 | SEQ ID NO: 1586 | | Cancer |
| HE2LW65 | SEQ ID NO: 1587 | | Cancer |
| HTFOS57 | SEQ ID NO: 1588 | | Cancer |
| HTFOS57 | SEQ ID NO: 1589 | | Cancer |
| HTFOS57 | SEQ ID NO: 1590 | | Cancer |
| HUVHI35 | SEQ ID NO: 1591 | | Cancer |
| HUVHI35 | SEQ ID NO: 1592 | | Cancer |
| HUVHI35 | SEQ ID NO: 1593 | | Cancer |
| HUVHI35 | SEQ ID NO: 1594 | | Cancer |
| HTPHS66 | SEQ ID NO: 1595 | | Cancer |
| HTPHS66 | SEQ ID NO: 1596 | | Cancer |
| HTPHS66 | SEQ ID NO: 1597 | | Cancer |
| HHFOJ29 | SEQ ID NO: 1598 | | Cancer |
| HHFOJ29 | SEQ ID NO: 1599 | | Cancer |
| HHFOJ29 | SEQ ID NO: 1600 | | Cancer |
| HMAMI15 | SEQ ID NO: 1601 | | Cancer |
| HTXQM57 | SEQ ID NO: 1602 | | Immune/Hematopoietic, |
| | | | Mixed Fetal |
| HE2RO22 | SEQ ID NO: 1603 | | Mixed Fetal |
| HE2RO22 | SEQ ID NO: 1604 | | Mixed Fetal |
| HE2SI26 | SEQ ID NO: 1605 | | Cancer |
| HTXRE15 | SEQ ID NO: 1606 | | Cancer |
| HTXRE15 | SEQ ID NO: 1607 | | Cancer |
| HUCPD31 | SEQ ID NO: 1608 | | Cancer |
| HUCPD31 | SEQ ID NO: 1609 | | Cancer |
| HFPHA80 | SEQ ID NO: 1610 | | Neural/Sensory |
| HFPHA80 | SEQ ID NO: 1611 | | Neural/Sensory |
| HFPHA80 | SEQ ID NO: 1612 | | Neural/Sensory |
| HFPHA80 | SEQ ID NO: 1613 | | Neural/Sensory |
| HFPHB92 | SEQ ID NO: 1614 | | Excretory, |
| | | | Neural/Sensory |
| HFPHS77 | SEQ ID NO: 1615 | | Cancer |
| HFPHS77 | SEQ ID NO: 1616 | | Cancer |
| HFPHS77 | SEQ ID NO: 1617 | | Cancer |
| HIPAJ43 | SEQ ID NO: 1618 | | Cancer |
| HIPAJ43 | SEQ ID NO: 1619 | | Cancer |
| HDDMW90 | SEQ ID NO: 1620 | | Cancer |
| HDDMW90 | SEQ ID NO: 1621 | | Cancer |
| HBCPB32 | SEQ ID NO: 1622 | | Neural/Sensory, |
| | | | Reproductive |
| HFVKC95 | SEQ ID NO: 1623 | | Cancer |
| HFVKC95 | SEQ ID NO: 1624 | | Cancer |
| HFVKC95 | SEQ ID NO: 1625 | | Cancer |
| HCOMM91 | SEQ ID NO: 1626 | | Cancer |
| HCOMM91 | SEQ ID NO: 1627 | | Cancer |
| HVVAM64 | SEQ ID NO: 1628 | | Cancer |
| HVVAM64 | SEQ ID NO: 1629 | | Cancer |
| HVVAM64 | SEQ ID NO: 1630 | | Cancer |
| HNBUC50 | SEQ ID NO: 1631 | | Cancer |
| HNBUC50 | SEQ ID NO: 1632 | | Cancer |
| HNBUC50 | SEQ ID NO: 1633 | | Cancer |
| HNBUC50 | SEQ ID NO: 1634 | | Cancer |
| HUUDF48 | SEQ ID NO: 1635 | | Immune/Hematopoietic |
| HUUDF48 | SEQ ID NO: 1636 | | Immune/Hematopoietic |
| HBCQL32 | SEQ ID NO: 1637 | | Cancer |
| HBCQL32 | SEQ ID NO: 1638 | | Cancer |
| HCBND16 | SEQ ID NO: 1639 | | Cancer |
| HCBND16 | SEQ ID NO: 1640 | | Cancer |
| HNNBM45 | SEQ ID NO: 1641 | | Immune/Hematopoietic, |
| | | | Reproductive |
| HNNBM45 | SEQ ID NO: 1642 | | Immune/Hematopoietic, |
| | | | Reproductive |
| HWMGN33 | SEQ ID NO: 1643 | | Digestive |
| HWMGN33 | SEQ ID NO: 1644 | | Digestive |
| HWMLN52 | SEQ ID NO: 1645 | | Digestive, |
| | | | Immune/Hematopoietic |
| HWMLN52 | SEQ ID NO: 1646 | | Digestive, |
| | | | Immune/Hematopoietic |
| HWMLN52 | SEQ ID NO: 1647 | | Digestive, |
| | | | Immune/Hematopoietic |
| HVARW53 | SEQ ID NO: 1648 | | Digestive |
| HVARW53 | SEQ ID NO: 1649 | | Digestive |
| HAHFU44 | SEQ ID NO: 1650 | | Cardiovascular, |
| | | | Digestive, |
| | | | Musculoskeletal |
| HAHFU44 | SEQ ID NO: 1651 | | Cardiovascular, |
| | | | Digestive, |
| | | | Musculoskeletal |
| HAHFU44 | SEQ ID NO: 1652 | | Cardiovascular, |
| | | | Digestive, |
| | | | Musculoskeletal |
| HCOOS80 | SEQ ID NO: 1653 | | Cancer |
| HCOOS80 | SEQ ID NO: 1654 | | Cancer |
| HCOOS80 | SEQ ID NO: 1655 | | Cancer |
| HNKCO80 | SEQ ID NO: 1656 | | Cancer |
| HNKCO80 | SEQ ID NO: 1657 | | Cancer |
| HLTIP27 | SEQ ID NO: 1658 | | Immune/Hematopoietic |
| HLTIP27 | SEQ ID NO: 1659 | | Immune/Hematopoietic |
| HLTIP94 | SEQ ID NO: 1660 | | Immune/Hematopoietic, |
| | | | Mixed Fetal, |
| | | | Neural/Sensory |
| HLTIP94 | SEQ ID NO: 1661 | | Immune/Hematopoietic, |
| | | | Mixed Fetal, |
| | | | Neural/Sensory |
| HLTIP94 | SEQ ID NO: 1662 | | Immune/Hematopoietic, |
| | | | Mixed Fetal, |
| | | | Neural/Sensory |
| HOCPM23 | SEQ ID NO: 1663 | | Reproductive |
| HOCPM23 | SEQ ID NO: 1664 | | Reproductive |
| HPDWP28 | SEQ ID NO: 1665 | | Reproductive |
| HPDWP28 | SEQ ID NO: 1666 | | Reproductive |
| HLCND09 | SEQ ID NO: 1667 | | Cancer |
| HLCND09 | SEQ ID NO: 1668 | | Cancer |
| HEEBI05 | SEQ ID NO: 1669 | | Digestive, |
| | | | Reproductive |
| HEEBB55 | SEQ ID NO: 1670 | | Cancer |
| HEEBB55 | SEQ ID NO: 1671 | | Cancer |
| HEEBB55 | SEQ ID NO: 1672 | | Cancer |
| HEGCL11 | SEQ ID NO: 1673 | | Cancer |
| HEGCL11 | SEQ ID NO: 1674 | | Cancer |
| HNTPB82 | SEQ ID NO: 1675 | | Cancer |
| HNTPB82 | SEQ ID NO: 1676 | | Cancer |
| HOFMM69 | SEQ ID NO: 1677 | | Reproductive |
| HOFMM69 | SEQ ID NO: 1678 | | Reproductive |
| HLDAB75 | SEQ ID NO: 1679 | | Cancer |
| HLDAB75 | SEQ ID NO: 1680 | | Cancer |
| HKACC80 | SEQ ID NO: 1681 | | Cancer |
| HKACC80 | SEQ ID NO: 1682 | | Cancer |
| HKACC80 | SEQ ID NO: 1683 | | Cancer |
| HKAEL28 | SEQ ID NO: 1684 | | Connective/Epithelial, |
| | | | Immune/Hematopoietic, |
| | | | Reproductive |
| HKAEL28 | SEQ ID NO: 1685 | | Connective/Epithelial, |
| | | | Immune/Hematopoietic, |
| | | | Reproductive |
| HDPGT25 | SEQ ID NO: 1686 | | Cancer |
| HDPGT25 | SEQ ID NO: 1687 | | Cancer |
| HLWBT09 | SEQ ID NO: 1688 | | Excretory, |
| | | | Reproductive |
| HLWBT09 | SEQ ID NO: 1689 | | Excretory, |
| | | | Reproductive |
| HHEDN80 | SEQ ID NO: 1690 | | Cancer |
| HHEDN80 | SEQ ID NO: 1691 | | Cancer |
| HHEDN80 | SEQ ID NO: 1692 | | Cancer |
| HDFQB14 | SEQ ID NO: 1693 | | Immune/Hematopoietic, |
| | | | Neural/Sensory, |
| | | | Reproductive |
| HWAAW33 | SEQ ID NO: 1694 | | Cardiovascular, |
| | | | Immune/Hematopoietic, |
| | | | Musculoskeletal |
| HWAAW33 | SEQ ID NO: 1695 | | Cardiovascular, |
| | | | Immune/Hematopoietic, |
| | | | Musculoskeletal |
| HWABF47 | SEQ ID NO: 1696 | | Cancer |
| HWABF47 | SEQ ID NO: 1697 | | Cancer |
| HWABI12 | SEQ ID NO: 1698 | | Immune/Hematopoietic |
| HWABI12 | SEQ ID NO: 1699 | | Immune/Hematopoietic |
| HWBBT49 | SEQ ID NO: 1700 | | Cancer |
| HWBBT49 | SEQ ID NO: 1701 | | Cancer |
| HWBBT49 | SEQ ID NO: 1702 | | Cancer |
| HAMGG89 | SEQ ID NO: 1703 | | Immune/Hematopoietic, |
| | | | Neural/Sensory, |
| | | | Reproductive |
| HAMGG89 | SEQ ID NO: 1704 | | Immune/Hematopoietic, |
| | | | Neural/Sensory, |
| | | | Reproductive |
| HAJBW16 | SEQ ID NO: 1705 | | Neural/Sensory |
| HAJBW16 | SEQ ID NO: 1706 | | Neural/Sensory |
| HNTAI35 | SEQ ID NO: 1707 | | Cancer |
| HNTAI35 | SEQ ID NO: 1708 | | Cancer |
| HNTAI35 | SEQ ID NO: 1709 | | Cancer |
| HNTAI35 | SEQ ID NO: 1710 | | Cancer |
| HNTAI35 | SEQ ID NO: 1711 | | Cancer |
| HNTBN41 | SEQ ID NO: 1712 | | Immune/Hematopoietic |
| HNTBN41 | SEQ ID NO: 1713 | | Immune/Hematopoietic |
| HNTBN41 | SEQ ID NO: 1714 | | Immune/Hematopoietic |
| HNTBN41 | SEQ ID NO: 1715 | | Immune/Hematopoietic |
| HDPRJ60 | SEQ ID NO: 1716 | | Cancer |
| HDPRJ60 | SEQ ID NO: 1717 | | Cancer |
| HDPRJ60 | SEQ ID NO: 1718 | | Cancer |
| HDPSB01 | SEQ ID NO: 1719 | | Cancer |
| HDPSB01 | SEQ ID NO: 1720 | | Cancer |
| HDPSB01 | SEQ ID NO: 1721 | | Cancer |
| HDPSB01 | SEQ ID NO: 1722 | | Cancer |
| HDPSB01 | SEQ ID NO: 1723 | | Cancer |
| HDPTC31 | SEQ ID NO: 1724 | | Immune/Hematopoietic |
| HDPTC31 | SEQ ID NO: 1725 | | Immune/Hematopoietic |
| HDPTC31 | SEQ ID NO: 1726 | | Immune/Hematopoietic |
| HDPXL05 | SEQ ID NO: 1727 | | Immune/Hematopoietic, |
| | | | Reproductive |
| HDPXL05 | SEQ ID NO: 1728 | | Immune/Hematopoietic, |
| | | | Reproductive |
| HDPXL05 | SEQ ID NO: 1729 | | Immune/Hematopoietic, |
| | | | Reproductive |
| HDPXY88 | SEQ ID NO: 1730 | | Cancer |
| HDPXY88 | SEQ ID NO: 1731 | | Cancer |
| HDPXY88 | SEQ ID NO: 1732 | | Cancer |
| HLDQZ72 | SEQ ID NO: 1733 | | Cancer |
| HLDQZ72 | SEQ ID NO: 1734 | | Cancer |
| HLDQZ72 | SEQ ID NO: 1735 | | Cancer |
| HWBEV57 | SEQ ID NO: 1736 | | Immune/Hematopoietic |
| HWBEV57 | SEQ ID NO: 1737 | | Immune/Hematopoietic |
| HWBEV57 | SEQ ID NO: 1738 | | Immune/Hematopoietic |
| HAMHH20 | SEQ ID NO: 1739 | | Cancer |
| HAMHH20 | SEQ ID NO: 1740 | | Cancer |
| HDLAY18 | SEQ ID NO: 1741 | | Cancer |
| HDLAY18 | SEQ ID NO: 1742 | | Cancer |
| HKAHN23 | SEQ ID NO: 1743 | | Connective/Epithelial, |
| | | | Digestive, |
| | | | Mixed Fetal |
| HKAHN23 | SEQ ID NO: 1744 | | Connective/Epithelial, |
| | | | Digestive, |
| | | | Mixed Fetal |
| HKAJW28 | SEQ ID NO: 1745 | | Cancer |
| HKAJW28 | SEQ ID NO: 1746 | | Cancer |
| HDQFU73 | SEQ ID NO: 1747 | | Digestive, |
| | | | Immune/Hematopoietic |
| HDQFU73 | SEQ ID NO: 1748 | | Digestive, |
| | | | Immune/Hematopoietic |
| HDQFU73 | SEQ ID NO: 1749 | | Digestive, |
| | | | Immune/Hematopoietic |
| HDTKS69 | SEQ ID NO: 1750 | | Cancer |
| HSYDT06 | SEQ ID NO: 1751 | | Cancer |
| HSYDT06 | SEQ ID NO: 1752 | | Cancer |
| HSYDT06 | SEQ ID NO: 1753 | | Cancer |
| HSYDT06 | SEQ ID NO: 1754 | | Cancer |
| HNTEF28 | SEQ ID NO: 1755 | | Cancer |
| HNTEF28 | SEQ ID NO: 1756 | | Cancer |
| HNTEF53 | SEQ ID NO: 1757 | | Cancer |
| HNTEF53 | SEQ ID NO: 1758 | | Cancer |
| HNTEF53 | SEQ ID NO: 1759 | | Cancer |
| HNTEF53 | SEQ ID NO: 1760 | | Cancer |
| HDQFN60 | SEQ ID NO: 1761 | | Cancer |
| HDQFN60 | SEQ ID NO: 1762 | | Cancer |
| HHEXM06 | SEQ ID NO: 1763 | | Immune/Hematopoietic |
| HHEXM06 | SEQ ID NO: 1764 | | Immune/Hematopoietic |
| HBINU36 | SEQ ID NO: 1765 | | Connective/Epithelial, |
| | | | Immune/Hematopoietic, |
| | | | Musculoskeletal |
| HBINU36 | SEQ ID NO: 1766 | | Connective/Epithelial, |
| | | | Immune/Hematopoietic, |
| | | | Musculoskeletal |
| HBINU36 | SEQ ID NO: 1767 | | Connective/Epithelial, |
| | | | Immune/Hematopoietic, |
| | | | Musculoskeletal |
| HUJCQ39 | SEQ ID NO: 1768 | | Cancer |
| HUJCQ39 | SEQ ID NO: 1769 | | Cancer |
| HUJCQ39 | SEQ ID NO: 1770 | | Cancer |
| HCCCG83 | SEQ ID NO: 1771 | | Cancer |
| HCCCG83 | SEQ ID NO: 1772 | | Cancer |
| HCCCG83 | SEQ ID NO: 1773 | | Cancer |
| HWHIM26 | SEQ ID NO: 1774 | | Connective/Epithelial, |
| | | | Immune/Hematopoietic |
| HWHIM26 | SEQ ID NO: 1775 | | Connective/Epithelial, |
| | | | Immune/Hematopoietic |
| HWHKC09 | SEQ ID NO: 1776 | | Cancer |
| HWHKC09 | SEQ ID NO: 1777 | | Cancer |
| HWHKC09 | SEQ ID NO: 1778 | | Cancer |
| HWHKC09 | SEQ ID NO: 1779 | | Cancer |
| HWHKR51 | SEQ ID NO: 1780 | | Cancer |
| HWHKR51 | SEQ ID NO: 1781 | | Cancer |
| HWHKR51 | SEQ ID NO: 1782 | | Cancer |
| HWHRL06 | SEQ ID NO: 1783 | | Cancer |
| HWHRL06 | SEQ ID NO: 1784 | | Cancer |
| HAZAD32 | SEQ ID NO: 1785 | | Cancer |
| HAZAD32 | SEQ ID NO: 1786 | | Cancer |
| HPAMY60 | SEQ ID NO: 1787 | | Excretory |
| HPAMY60 | SEQ ID NO: 1788 | | Excretory |
| HAOTS04 | SEQ ID NO: 1789 | | Reproductive |
| HAOTS04 | SEQ ID NO: 1790 | | Reproductive |
| HAZAP37 | SEQ ID NO: 1791 | | Reproductive |
| HKZAS29 | SEQ ID NO: 1792 | | Cancer |
| HKZAS29 | SEQ ID NO: 1793 | | Cancer |
| HOVJP29 | SEQ ID NO: 1794 | | Reproductive |
| HOVJP29 | SEQ ID NO: 1795 | | Reproductive |
| HWHSB53 | SEQ ID NO: 1796 | | Cancer |
| HWHSB53 | SEQ ID NO: 1797 | | Cancer |
| HKZBS01 | SEQ ID NO: 1798 | | Cancer |
| HKZBS01 | SEQ ID NO: 1799 | | Cancer |
| HWHSO13 | SEQ ID NO: 1800 | | Connective/Epithelial |
| HWHSO13 | SEQ ID NO: 1801 | | Connective/Epithelial |
| HKZCK47 | SEQ ID NO: 1802 | | Immune/Hematopoietic, |
| | | | Reproductive |
| HCUHQ40 | SEQ ID NO: 1803 | | Cancer |
| HCUHQ40 | SEQ ID NO: 1804 | | Cancer |
| HCUHQ40 | SEQ ID NO: 1805 | | Cancer |
| HPJCP79 | SEQ ID NO: 1806 | | Cancer |
| HPJCP79 | SEQ ID NO: 1807 | | Cancer |
| HPJCP79 | SEQ ID NO: 1808 | | Cancer |
| HPJCP79 | SEQ ID NO: 1809 | | Cancer |
| HFXDI56 | SEQ ID NO: 1810 | | Immune/Hematopoietic, |
| | | | Musculoskeletal, |
| | | | Neural/Sensory |
| HFXDI56 | SEQ ID NO: 1811 | | Immune/Hematopoietic, |
| | | | Musculoskeletal, |
| | | | Neural/Sensory |
| HFXDI56 | SEQ ID NO: 1812 | | Immune/Hematopoietic, |
| | | | Musculoskeletal, |
| | | | Neural/Sensory |
| HFXDI56 | SEQ ID NO: 1813 | | Immune/Hematopoietic, |
| | | | Musculoskeletal, |
| | | | Neural/Sensory |
| HRDEP41 | SEQ ID NO: 1814 | | Cancer |
| HRDEP41 | SEQ ID NO: 1815 | | Cancer |
| HTEGF16 | SEQ ID NO: 1816 | | Cancer |
| HTEGF16 | SEQ ID NO: 1817 | | Cancer |
| HTEGF16 | SEQ ID NO: 1818 | | Cancer |
| HSUMA53 | SEQ ID NO: 1819 | | Cancer |
| HSUMA53 | SEQ ID NO: 1820 | | Cancer |
| HSUMA53 | SEQ ID NO: 1821 | | Cancer |
| HSUMA53 | SEQ ID NO: 1822 | | Cancer |
| HISET33 | SEQ ID NO: 1823 | | Digestive |
| HISET33 | SEQ ID NO: 1824 | | Digestive |
| HTTIJ31 | SEQ ID NO: 1825 | | Reproductive |
| HTTIJ31 | SEQ ID NO: 1826 | | Reproductive |
| HTPFX16 | SEQ ID NO: 1827 | | Digestive, |
| | | | Reproductive, |
| | | | Respiratory |
| HTPFX16 | SEQ ID NO: 1828 | | Digestive, |
| | | | Reproductive, |
| | | | Respiratory |
| HTFMX90 | SEQ ID NO: 1829 | | Cancer |
| HTFMX90 | SEQ ID NO: 1830 | | Cancer |
| HTFMX90 | SEQ ID NO: 1831 | | Cancer |
| HE8FD93 | SEQ ID NO: 1832 | | Cancer |
| HE8FD93 | SEQ ID NO: 1833 | | Cancer |
| HE8FD93 | SEQ ID NO: 1834 | | Cancer |
| HE8FD93 | SEQ ID NO: 1835 | | Cancer |
| HKGBJ74 | SEQ ID NO: 1836 | | Cancer |
| HKGBJ74 | SEQ ID NO: 1837 | | Cancer |
| HKGBJ74 | SEQ ID NO: 1838 | | Cancer |
| HKGBJ74 | SEQ ID NO: 1839 | | Cancer |
| HEEAG84 | SEQ ID NO: 1840 | | Reproductive |
| HEEAG84 | SEQ ID NO: 1841 | | Reproductive |
| HEOQX60 | SEQ ID NO: 1842 | | Cancer |
| HEOQX60 | SEQ ID NO: 1843 | | Cancer |
| HNGGB09 | SEQ ID NO: 1844 | | Immune/Hematopoietic |
| HNGGB09 | SEQ ID NO: 1845 | | Immune/Hematopoietic |
| HKIYI48 | SEQ ID NO: 1846 | | Cancer |
| HKIYI48 | SEQ ID NO: 1847 | | Cancer |
| HKIYI48 | SEQ ID NO: 1848 | | Cancer |
| HKIYI48 | SEQ ID NO: 1849 | | Cancer |
| HSYAB05 | SEQ ID NO: 1850 | | Cancer |
| HSYAB05 | SEQ ID NO: 1851 | | Cancer |
| HARMJ38 | SEQ ID NO: 1852 | | Cancer |
| HARMJ38 | SEQ ID NO: 1853 | | Cancer |
| HARMJ38 | SEQ ID NO: 1854 | | Cancer |
| HARMJ38 | SEQ ID NO: 1855 | | Cancer |
| HDTJG33 | SEQ ID NO: 1856 | | Cancer |
| HWAGJ85 | SEQ ID NO: 1857 | | Cardiovascular, |
| | | | Immune/Hematopoietic |
| HWAGJ85 | SEQ ID NO: 1858 | | Cardiovascular, |
| | | | Immune/Hematopoietic |
| HE2OW03 | SEQ ID NO: 1859 | | Mixed Fetal |
| HE2OW03 | SEQ ID NO: 1860 | | Mixed Fetal |
| HBQAE92 | SEQ ID NO: 1861 | | Digestive, |
| | | | Neural/Sensory |
| HBQAE92 | SEQ ID NO: 1862 | | Digestive, |
| | | | Neural/Sensory |
| HBQAE92 | SEQ ID NO: 1863 | | Digestive, |
| | | | Neural/Sensory |
| HTODL92 | SEQ ID NO: 1864 | | Cancer |
| HTODL92 | SEQ ID NO: 1865 | | Cancer |
| HTODL92 | SEQ ID NO: 1866 | | Cancer |
| HLQBR41 | SEQ ID NO: 1867 | | Cancer |
| HLQBR41 | SEQ ID NO: 1868 | | Cancer |
| HDSAP92 | SEQ ID NO: 1869 | | Cancer |
| HDSAP92 | SEQ ID NO: 1870 | | Cancer |
| HTAEC92 | SEQ ID NO: 1871 | | Cancer |
| HTAEC92 | SEQ ID NO: 1872 | | Cancer |
| HSLCK11 | SEQ ID NO: 1873 | | Cancer |
| HSLCK11 | SEQ ID NO: 1874 | | Cancer |
| HSLCK11 | SEQ ID NO: 1875 | | Cancer |
| HFCDR13 | SEQ ID NO: 1876 | | Neural/Sensory |
| HSLDS06 | SEQ ID NO: 1877 | | Musculoskeletal |
| HSLEF58 | SEQ ID NO: 1878 | | Cardiovascular, |
| | | | Digestive, |
| | | | Musculoskeletal |
| HPCAO10 | SEQ ID NO: 1879 | | Cancer |
| HMEJL61 | SEQ ID NO: 1880 | | Cancer |
| HMEJL61 | SEQ ID NO: 1881 | | Cancer |
| HMEJL61 | SEQ ID NO: 1882 | | Cancer |
| HUSHH92 | SEQ ID NO: 1883 | | Cancer |
| HUSHH92 | SEQ ID NO: 1884 | | Cancer |
| HUSHH92 | SEQ ID NO: 1885 | | Cancer |
| HUSHH92 | SEQ ID NO: 1886 | | Cancer |
| HBZAI90 | SEQ ID NO: 1887 | | Immune/Hematopoietic, |
| | | | Reproductive |
| HBZAI90 | SEQ ID NO: 1888 | | Immune/Hematopoietic, |
| | | | Reproductive |
| HNGIQ57 | SEQ ID NO: 1889 | | Immune/Hematopoietic |
| HNGIQ57 | SEQ ID NO: 1890 | | Immune/Hematopoietic |
| HNGJF62 | SEQ ID NO: 1891 | | Immune/Hematopoietic |
| HNGJF62 | SEQ ID NO: 1892 | | Immune/Hematopoietic |
| HFXJY38 | SEQ ID NO: 1893 | | Neural/Sensory |
| HFXJY38 | SEQ ID NO: 1894 | | Neural/Sensory |
| HFXKR54 | SEQ ID NO: 1895 | | Endocrine, |
| | | | Immune/Hematopoietic, |
| | | | Neural/Sensory |
| HFXKR54 | SEQ ID NO: 1896 | | Endocrine, |
| | | | Immune/Hematopoietic, |
| | | | Neural/Sensory |
| HFXKR54 | SEQ ID NO: 1897 | | Endocrine, |
| | | | Immune/Hematopoietic, |
| | | | Neural/Sensory |
| HAPOB80 | SEQ ID NO: 1898 | | Immune/Hematopoietic, |
| | | | Musculoskeletal |
| HAPOB80 | SEQ ID NO: 1899 | | Immune/Hematopoietic, |
| | | | Musculoskeletal |
| HAPOB80 | SEQ ID NO: 1900 | | Immune/Hematopoietic, |
| | | | Musculoskeletal |
| HAPOB80 | SEQ ID NO: 1901 | | Immune/Hematopoietic, |
| | | | Musculoskeletal |
| HBJHJ80 | SEQ ID NO: 1902 | | Connective/Epithelial, |
| | | | Immune/Hematopoietic, |
| | | | Reproductive |
| HFADF37 | SEQ ID NO: 1903 | | Cancer |
| HFADF37 | SEQ ID NO: 1904 | | Cancer |
| HNTSS75 | SEQ ID NO: 1905 | | Cancer |
| HCQDE22 | SEQ ID NO: 1906 | | Digestive |
| HCQDE22 | SEQ ID NO: 1907 | | Digestive |
| HE8NQ42 | SEQ ID NO: 1908 | | Mixed Fetal |
| HE8NQ42 | SEQ ID NO: 1909 | | Mixed Fetal |
| HE8QD31 | SEQ ID NO: 1910 | | Digestive, |
| | | | Mixed Fetal, |
| | | | Neural/Sensory |
| HE8QD31 | SEQ ID NO: 1911 | | Digestive, |
| | | | Mixed Fetal, |
| | | | Neural/Sensory |
| HE9PR39 | SEQ ID NO: 1912 | | Digestive, |
| | | | Mixed Fetal, |
| | | | Musculoskeletal |
| HE9PR39 | SEQ ID NO: 1913 | | Digestive, |
| | | | Mixed Fetal, |
| | | | Musculoskeletal |
| HE9PR39 | SEQ ID NO: 1914 | | Digestive, |
| | | | Mixed Fetal, |
| | | | Musculoskeletal |
| HE9PR39 | SEQ ID NO: 1915 | | Digestive, |
| | | | Mixed Fetal, |
| | | | Musculoskeletal |
| HNHLA36 | SEQ ID NO: 1916 | | Immune/Hematopoietic, |
| | | | Reproductive |
| HNHLA36 | SEQ ID NO: 1917 | | Immune/Hematopoietic, |
| | | | Reproductive |
| HNHOD23 | SEQ ID NO: 1918 | | Cancer |
| HNHOD23 | SEQ ID NO: 1919 | | Cancer |
| HNHOD23 | SEQ ID NO: 1920 | | Cancer |
| HNGNI25 | SEQ ID NO: 1921 | | Immune/Hematopoietic |
| HNGNI25 | SEQ ID NO: 1922 | | Immune/Hematopoietic |
| HNGNI25 | SEQ ID NO: 1923 | | Immune/Hematopoietic |
| HNGNI25 | SEQ ID NO: 1924 | | Immune/Hematopoietic |
| HNGOQ44 | SEQ ID NO: 1925 | | Immune/Hematopoietic |
| HNGOQ44 | SEQ ID NO: 1926 | | Immune/Hematopoietic |
| HTLGE31 | SEQ ID NO: 1927 | | Immune/Hematopoietic, |
| HODHE60 | SEQ ID NO: 1928 | | Reproductive |
| HODHE60 | SEQ ID NO: 1929 | | Reproductive |
| HTLIV19 | SEQ ID NO: 1930 | | Reproductive |
| HOSDW58 | SEQ ID NO: 1931 | | Cancer |
| HOSDW58 | SEQ ID NO: 1932 | | Cancer |
| HOSDW58 | SEQ ID NO: 1933 | | Cancer |
| HPJDM47 | SEQ ID NO: 1934 | | Reproductive |
| HPJDM47 | SEQ ID NO: 1935 | | Reproductive |
| HPJEC20 | SEQ ID NO: 1936 | | Cancer |
| HPJEC20 | SEQ ID NO: 1937 | | Cancer |
| HTTJK27 | SEQ ID NO: 1938 | | Reproductive |
| HTTJK27 | SEQ ID NO: 1939 | | Reproductive |
| HTFOE85 | SEQ ID NO: 1940 | | Immune/Hematopoietic |
| HTFOE85 | SEQ ID NO: 1941 | | Immune/Hematopoietic |
| HTFOE85 | SEQ ID NO: 1942 | | Immune/Hematopoietic |
| HIPBA31 | SEQ ID NO: 1943 | | Cancer |
| HIPBA31 | SEQ ID NO: 1944 | | Cancer |
| HFVJY02 | SEQ ID NO: 1945 | | Digestive, |
| | | | Mixed Fetal, |
| | | | Neural/Sensory |
| HFVJY02 | SEQ ID NO: 1946 | | Digestive, |
| | | | Mixed Fetal, |
| | | | Neural/Sensory |
| HFVJY02 | SEQ ID NO: 1947 | | Digestive, |
| | | | Mixed Fetal, |
| | | | Neural/Sensory |
| HFVJY02 | SEQ ID NO: 1948 | | Digestive, |
| | | | Mixed Fetal, |
| | | | Neural/Sensory |
| HFVJY02 | SEQ ID NO: 1949 | | Digestive, |
| | | | Mixed Fetal, |
| | | | Neural/Sensory |
| HOCOO19 | SEQ ID NO: 1950 | | Cancer |
| HOCOO19 | SEQ ID NO: 1951 | | Cancer |
| HOCOO19 | SEQ ID NO: 1952 | | Cancer |
| HWMKQ25 | SEQ ID NO: 1953 | | Digestive, |
| | | | Reproductive |
| HWMKQ25 | SEQ ID NO: 1954 | | Digestive, |
| | | | Reproductive |
| HWMKQ25 | SEQ ID NO: 1955 | | Digestive, |
| | | | Reproductive |
| HCOPG62 | SEQ ID NO: 1956 | | Cancer |
| HCOPG62 | SEQ ID NO: 1957 | | Cancer |
| HNKEL47 | SEQ ID NO: 1958 | | Cardiovascular, |
| | | | Connective/Epithelial, |
| | | | Digestive |
| HNKEL47 | SEQ ID NO: 1959 | | Cardiovascular, |
| | | | Connective/Epithelial, |
| | | | Digestive |
| HTPIY88 | SEQ ID NO: 1960 | | Digestive |
| HTPIY88 | SEQ ID NO: 1961 | | Digestive |
| HTPIY88 | SEQ ID NO: 1962 | | Digestive |
| HTPIY88 | SEQ ID NO: 1963 | | Digestive |
| HEGBS69 | SEQ ID NO: 1964 | | Neural/Sensory, |
| | | | Reproductive |
| HEGBS69 | SEQ ID NO: 1965 | | Neural/Sensory, |
| | | | Reproductive |
| HOFMU07 | SEQ ID NO: 1966 | | Reproductive |
| HOFMU07 | SEQ ID NO: 1967 | | Reproductive |
| HLWBM40 | SEQ ID NO: 1968 | | Neural/Sensory, |
| | | | Reproductive |
| HLWBM40 | SEQ ID NO: 1969 | | Neural/Sensory, |
| | | | Reproductive |
| HLWBM40 | SEQ ID NO: 1970 | | Neural/Sensory, |
| | | | Reproductive |
| HAMFT10 | SEQ ID NO: 1971 | | Cancer |
| HAMFT10 | SEQ ID NO: 1972 | | Cancer |
| HNTBP17 | SEQ ID NO: 1973 | | Cancer |
| HNTBP17 | SEQ ID NO: 1974 | | Cancer |
| HWDAO40 | SEQ ID NO: 1975 | | Cancer |
| HWDAO40 | SEQ ID NO: 1976 | | Cancer |
| HWDAO40 | SEQ ID NO: 1977 | | Cancer |
| HAJCL25 | SEQ ID NO: 1978 | | Immune/Hematopoietic |
| HAJCL25 | SEQ ID NO: 1979 | | Immune/Hematopoietic |
| HAJCL25 | SEQ ID NO: 1980 | | Immune/Hematopoietic |
| HNTEO95 | SEQ ID NO: 1981 | | Immune/Hematopoietic |
| HNTEO95 | SEQ ID NO: 1982 | | Immune/Hematopoietic |
| HNTEO95 | SEQ ID NO: 1983 | | Immune/Hematopoietic |
| HWAFG52 | SEQ ID NO: 1984 | | Cancer |
| HWAFG52 | SEQ ID NO: 1985 | | Cancer |
| HWAFG52 | SEQ ID NO: 1986 | | Cancer |
| HWAFG52 | SEQ ID NO: 1987 | | Cancer |
| HWAHE17 | SEQ ID NO: 1988 | | Digestive, |
| | | | Immune/Hematopoietic |
| HWAHE17 | SEQ ID NO: 1989 | | Digestive, |
| | | | Immune/Hematopoietic |
| HWAHE17 | SEQ ID NO: 1990 | | Digestive, |
| | | | Immune/Hematopoietic |
| HUJBK19 | SEQ ID NO: 1991 | | Cancer |
| HUJBK19 | SEQ ID NO: 1992 | | Cancer |
| HUJBK19 | SEQ ID NO: 1993 | | Cancer |
| HWHJD93 | SEQ ID NO: 1994 | | Cancer |
| HWHJD93 | SEQ ID NO: 1995 | | Cancer |
| HAOST94 | SEQ ID NO: 1996 | | Cancer |
| HAOST94 | SEQ ID NO: 1997 | | Cancer |
| HKZAH22 | SEQ ID NO: 1998 | | Reproductive |
| HKZAH22 | SEQ ID NO: 1999 | | Reproductive |
| HKZAH22 | SEQ ID NO: 2000 | | Reproductive |
| HKZAO35 | SEQ ID NO: 2001 | | Reproductive |
| HKZAO35 | SEQ ID NO: 2002 | | Reproductive |
| HWHSK19 | SEQ ID NO: 2003 | | Cancer |
| HWHSK19 | SEQ ID NO: 2004 | | Cancer |
| HWHSK19 | SEQ ID NO: 2005 | | Cancer |
| HMWFG79 | SEQ ID NO: 2006 | | Digestive, |
| | | | Immune/Hematopoietic, |
| | | | Reproductive |
| HMWFG79 | SEQ ID NO: 2007 | | Digestive, |
| | | | Immune/Hematopoietic, |
| | | | Reproductive |
| HMWFG79 | SEQ ID NO: 2008 | | Digestive, |
| | | | Immune/Hematopoietic, |
| | | | Reproductive |
| HMWFG79 | SEQ ID NO: 2009 | | Digestive, |
| | | | Immune/Hematopoietic, |
| | | | Reproductive |
| HMWFG79 | SEQ ID NO: 2010 | | Digestive, |
| | | | Immune/Hematopoietic, |
| | | | Reproductive |
| HMTAE85 | SEQ ID NO: 2011 | | Cancer |
| HMTBI36 | SEQ ID NO: 2012 | | Cancer |
| HSUME76 | SEQ ID NO: 2013 | | Cancer |
| HSUME76 | SEQ ID NO: 2014 | | Cancer |
| HTEAF65 | SEQ ID NO: 2015 | | Excretory, |
| | | | Reproductive |
| HTEAT31 | SEQ ID NO: 2016 | | Cancer |
| HAJAN23 | SEQ ID NO: 2017 | | Cancer |
| HAPRJ16 | SEQ ID NO: 2018 | | Cancer |
| HDTDT55 | SEQ ID NO: 2019 | | Cancer |
| HSKDA27 | SEQ ID NO: 2020 | | Cancer |
| HSKDA27 | SEQ ID NO: 2021 | | Cancer |
| HWLED11 | SEQ ID NO: 2022 | | Cancer |
| HADGD33 | SEQ ID NO: 2023 | | Connective/Epithelial, |
| | | | Neural/Sensory, |
| | | | Reproductive |
| HCEBF19 | SEQ ID NO: 2024 | | Cancer |
| HCEBF19 | SEQ ID NO: 2025 | | Cancer |
| HDPHH40 | SEQ ID NO: 2026 | | Cancer |
| HHEPM33 | SEQ ID NO: 2027 | | Cancer |
| HJBAF16 | SEQ ID NO: 2028 | | Cancer |
| HJBCU04 | SEQ ID NO: 2029 | | Cancer |
| HWABY10 | SEQ ID NO: 2030 | | Cancer |
| HWABY10 | SEQ ID NO: 2031 | | Cancer |
| HWABY10 | SEQ ID NO: 2032 | | Cancer |
| HWABY10 | SEQ ID NO: 2033 | | Cancer |
| HDPQN11 | SEQ ID NO: 2034 | | Cancer |
| HDPQN11 | SEQ ID NO: 2035 | | Cancer |
| HMSAW68 | SEQ ID NO: 2036 | | Cancer |
| HMSGP80 | SEQ ID NO: 2037 | | Cancer |
| HPJBZ76 | SEQ ID NO: 2038 | | Cancer |
| HSIGM62 | SEQ ID NO: 2039 | | Cancer |
| HSLHS22 | SEQ ID NO: 2040 | | Cancer |
| HTXOZ19 | SEQ ID NO: 2041 | | Cancer |
| HTXOZ19 | SEQ ID NO: 2042 | | Cancer |
| HAPQQ94 | SEQ ID NO: 2043 | | Immune/Hematopoietic, |
| | | | Reproductive |
| HAPQQ94 | SEQ ID NO: 2044 | | Immune/Hematopoietic, |
| | | | Reproductive |
| HAPSA79 | SEQ ID NO: 2045 | | Cancer |
| HAPSA79 | SEQ ID NO: 2046 | | Cancer |
| HAPSA79 | SEQ ID NO: 2047 | | Cancer |
| HDPAJ93 | SEQ ID NO: 2048 | | Cancer |
| HELGF34 | SEQ ID NO: 2049 | | Cancer |
| HETEQ88 | SEQ ID NO: 2050 | | Cancer |
| HMSAC18 | SEQ ID NO: 2051 | | Cancer |
| HMSAC18 | SEQ ID NO: 2052 | | Cancer |
| HPQSH59 | SEQ ID NO: 2053 | | Cancer |
| HSIFV30 | SEQ ID NO: 2054 | | Cancer |
| HSVCB08 | SEQ ID NO: 2055 | | Cancer |
| HT3SF53 | SEQ ID NO: 2056 | | Cancer |
| HARMS04 | SEQ ID NO: 2057 | | Connective/Epithelial, |
| | | | Digestive |
| HCDBP36 | SEQ ID NO: 2058 | | Musculoskeletal |
| HCEPE30 | SEQ ID NO: 2059 | | Excretory, |
| | | | Neural/Sensory |
| HE9RM63 | SEQ ID NO: 2060 | | Cancer |
| HKAJF71 | SEQ ID NO: 2061 | | Cancer |
| HNBAF49 | SEQ ID NO: 2062 | | Cancer |
| HSLDJ89 | SEQ ID NO: 2063 | | Cancer |
| HSXGI47 | SEQ ID NO: 2064 | | Cancer |
| HTEAJ18 | SEQ ID NO: 2065 | | Reproductive |
| HTTEV40 | SEQ ID NO: 2066 | | Cancer |
| HWBCB89 | SEQ ID NO: 2067 | | Cancer |
| HWHGZ51 | SEQ ID NO: 2068 | | Cancer |
| HADDH60 | SEQ ID NO: 2069 | | Connective/Epithelial, |
| | | | Immune/Hematopoietic, |
| | | | Neural/Sensory |
| HBXCL93 | SEQ ID NO: 2070 | | Neural/Sensory, |
| | | | Reproductive |
| HPTRH66 | SEQ ID NO: 2071 | | Cancer |
| HNFHD58 | SEQ ID NO: 2072 | | Cancer |
| HACAB58 | SEQ ID NO: 2073 | | Cancer |
| HCE3Z39 | SEQ ID NO: 2074 | | Cancer |
| HCFCU69 | SEQ ID NO: 2075 | | Cancer |
| HCE3Z39 | SEQ ID NO: 2076 | | Cancer |
| HCELE47 | SEQ ID NO: 2077 | | Cancer |
| HCWHP79 | SEQ ID NO: 2078 | | Immune/Hematopoietic |
| HDLAG89 | SEQ ID NO: 2079 | | Cancer |
| HDLAO28 | SEQ ID NO: 2080 | | Cancer |
| HDQGY41 | SEQ ID NO: 2081 | | Cancer |
| HE8FK78 | SEQ ID NO: 2082 | | Cancer |
| HE8FK78 | SEQ ID NO: 2083 | | Cancer |
| HETHR73 | SEQ ID NO: 2084 | | Cancer |
| HFIUW36 | SEQ ID NO: 2085 | | Cancer |
| HFKKS66 | SEQ ID NO: 2086 | | Cancer |
| HFPFK57 | SEQ ID NO: 2087 | | Neural/Sensory, |
| | | | Reproductive |
| HFVJP07 | SEQ ID NO: 2088 | | Digestive, |
| | | | Immune/Hematopoietic |
| HLQEM64 | SEQ ID NO: 2089 | | Cancer |
| HSSDG41 | SEQ ID NO: 2090 | | Cancer |
| HLQGP82 | SEQ ID NO: 2091 | | Connective/Epithelial, |
| | | | Digestive, |
| | | | Musculoskeletal |
| HMSMD07 | SEQ ID NO: 2092 | | Cancer |
| HNGIR58 | SEQ ID NO: 2093 | | Immune/Hematopoietic |
| HMAMI21 | SEQ ID NO: 2094 | | Cancer |
| HNHNB29 | SEQ ID NO: 2095 | | Immune/Hematopoietic |
| HNTEO78 | SEQ ID NO: 2096 | | Digestive, |
| | | | Immune/Hematopoietic |
| HJPAY76 | SEQ ID NO: 2097 | | Cancer |
| HOEEK12 | SEQ ID NO: 2098 | | Cancer |
| HOFNC14 | SEQ ID NO: 2099 | | Reproductive |
| HOSNU69 | SEQ ID NO: 2100 | | Cancer |
| HPJCL28 | SEQ ID NO: 2101 | | Neural/Sensory, |
| | | | Reproductive |
| HRACI26 | SEQ ID NO: 2102 | | Digestive, |
| | | | Excretory |
| HTLIT63 | SEQ ID NO: 2103 | | Reproductive |
| HTEAM34 | SEQ ID NO: 2104 | | Reproductive |
| HTEAM34 | SEQ ID NO: 2105 | | Reproductive |
| HUFGH53 | SEQ ID NO: 2106 | | Cancer |
| HUSBA88 | SEQ ID NO: 2107 | | Cancer |
| HELHN47 | SEQ ID NO: 2108 | | Cancer |
| HELHN47 | SEQ ID NO: 2109 | | Cancer |
| HELHN47 | SEQ ID NO: 2110 | | Cancer |
| HETAY39 | SEQ ID NO: 2111 | | Cancer |
| HFICR14 | SEQ ID NO: 2112 | | Cancer |
| HFICR14 | SEQ ID NO: 2113 | | Cancer |
| HFKET18 | SEQ ID NO: 2114 | | Cancer |
| HFXDK20 | SEQ ID NO: 2115 | | Immune/Hematopoietic, |
| | | | Neural/Sensory |
| HKMLX18 | SEQ ID NO: 2116 | | Cancer |
| HMSCM88 | SEQ ID NO: 2117 | | Immune/Hematopoietic |
| HMABG70 | SEQ ID NO: 2118 | | Connective/Epithelial, |
| | | | Immune/Hematopoietic, |
| | | | Musculoskeletal |
| HMADJ74 | SEQ ID NO: 2119 | | Connective/Epithelial, |
| | | | Immune/Hematopoietic, |
| | | | Musculoskeletal |
| HMADJ14 | SEQ ID NO: 2120 | | Connective/Epithelial, |
| | | | Immune/Hematopoietic, |
| | | | Musculoskeletal |
| HMADJ14 | SEQ ID NO: 2121 | | Connective/Epithelial, |
| | | | Immune/Hematopoietic, |
| | | | Musculoskeletal |
| HMADJ14 | SEQ ID NO: 2122 | | Connective/Epithelial, |
| | | | Immune/Hematopoietic, |
| | | | Musculoskeletal |
| HNEBY54 | SEQ ID NO: 2123 | | Cancer |
| HNEDD37 | SEQ ID NO: 2124 | | Cancer |
| HNGOU82 | SEQ ID NO: 2125 | | Immune/Hematopoietic, |
| | | | Reproductive |
| HNGOW62 | SEQ ID NO: 2126 | | Immune/Hematopoietic |
| HSIC066 | SEQ ID NO: 2127 | | Cancer |
| HSIDQ93 | SEQ ID NO: 2128 | | Cancer |
| HSLGM81 | SEQ ID NO: 2129 | | Cancer |
| HSYBM41 | SEQ ID NO: 2130 | | Cancer |
| HSODB85 | SEQ ID NO: 2131 | | Cancer |
| HSRFZ57 | SEQ ID NO: 2132 | | Excretory, |
| | | | Musculoskeletal |
| HSXAZ05 | SEQ ID NO: 2133 | | Neural/Sensory, |
| | | | Respiratory |
| HTPCW21 | SEQ ID NO: 2134 | | Digestive, |
| | | | Neural/Sensory |
| HTPCW21 | SEQ ID NO: 2135 | | Digestive, |
| | | | Neural/Sensory |
| HTXKF95 | SEQ ID NO: 2136 | | Cancer |
| HTXKF95 | SEQ ID NO: 2137 | | Cancer |
| HUFBC44 | SEQ ID NO: 2138 | | Digestive, |
| | | | Mixed Fetal, |
| | | | Neural/Sensory |
| HAAAI67 | SEQ ID NO: 2139 | | Cancer |
| HFKIA71 | SEQ ID NO: 2140 | | Cancer |
| HAMFP32 | SEQ ID NO: 2141 | | Cancer |
| HAPQU71 | SEQ ID NO: 2142 | | Cancer |
| HAPQU71 | SEQ ID NO: 2143 | | Cancer |
| HLHDL42 | SEQ ID NO: 2144 | | Cancer |
| HAVVG36 | SEQ ID NO: 2145 | | Cancer |
| HBGNP63 | SEQ ID NO: 2146 | | Reproductive |
| HBJNC59 | SEQ ID NO: 2147 | | Cancer |
| HAPQT56 | SEQ ID NO: 2148 | | Cancer |
| HCABW07 | SEQ ID NO: 2149 | | Cancer |
| HDPFB02 | SEQ ID NO: 2150 | | Cancer |
| HMWDB84 | SEQ ID NO: 2151 | | Cancer |
| HDPFB02 | SEQ ID NO: 2152 | | Cancer |
| HDPFY41 | SEQ ID NO: 2153 | | Cancer |
| HDPIE85 | SEQ ID NO: 2154 | | Cancer |
| HDPOE32 | SEQ ID NO: 2155 | | Cancer |
| HWABL61 | SEQ ID NO: 2156 | | Cancer |
| HWABW88 | SEQ ID NO: 2157 | | Cancer |
| HWDAQ83 | SEQ ID NO: 2158 | | Cancer |
| HWDAQ83 | SEQ ID NO: 2159 | | Cancer |
| HWLHZ79 | SEQ ID NO: 2160 | | Connective/Epithelial, |
| | | | Digestive, |
| | | | Reproductive |
| HTXJM94 | SEQ ID NO: 2161 | | Cancer |
| HDPQG01 | SEQ ID NO: 2162 | | Cancer |
| HJPAD80 | SEQ ID NO: 2163 | | Cancer |
| HDPQG01 | SEQ ID NO: 2164 | | Cancer |
| HFXLF67 | SEQ ID NO: 2165 | | Neural/Sensory |
| HE2IO57 | SEQ ID NO: 2166 | | Cancer |
| HKGDP17 | SEQ ID NO: 2167 | | Respiratory |
| HLQFB12 | SEQ ID NO: 2168 | | Digestive, |
| | | | Reproductive |
| HLQFT18 | SEQ ID NO: 2169 | | Digestive, |
| | | | Reproductive |
| HOFNX30 | SEQ ID NO: 2170 | | Reproductive |
| HSSDM23 | SEQ ID NO: 2171 | | Cancer |
| HSSDM23 | SEQ ID NO: 2172 | | Cancer |
| HSVBD67 | SEQ ID NO: 2173 | | Cancer |
| HSVBD67 | SEQ ID NO: 2174 | | Cancer |
| HTGAT51 | SEQ ID NO: 2175 | | Cardiovascular, |
| | | | Immune/Hematopoietic, |
| | | | Reproductive |
| HTLGV19 | SEQ ID NO: 2176 | | Excretory, |
| | | | Reproductive |
| HTPHH74 | SEQ ID NO: 2177 | | Cancer |
| HTFOB75 | SEQ ID NO: 2178 | | Cancer |
| HTPHH74 | SEQ ID NO: 2179 | | Cancer |
| HWHGK36 | SEQ ID NO: 2180 | | Cancer |
| HLWAD77 | SEQ ID NO: 2181 | | Cancer |
| HDTGF15 | SEQ ID NO: 2182 | | Cancer |
| HWMBB68 | SEQ ID NO: 2183 | | Cancer |
| HWMBB68 | SEQ ID NO: 2184 | | Cancer |
| HAGDA35 | SEQ ID NO: 2185 | | Cancer |
| HAGDA35 | SEQ ID NO: 2186 | | Cancer |
| HAGDA35 | SEQ ID NO: 2187 | | Cancer |
| HRODQ04 | SEQ ID NO: 2188 | | Cancer |
| HTOJV86 | SEQ ID NO: 2189 | | Cancer |
| HCEFZ82 | SEQ ID NO: 2190 | | Cancer |
| HNGFW58 | SEQ ID NO: 2191 | | Cancer |
| HHBGE77 | SEQ ID NO: 2192 | | Cancer |
| HADFW77 | SEQ ID NO: 2193 | | Cancer |
| HSIED48 | SEQ ID NO: 2194 | | Cancer |
| HCEFZ82 | SEQ ID NO: 2195 | | Cancer |
| HTTCT46 | SEQ ID NO: 2196 | | Cancer |
| HSDEE58 | SEQ ID NO: 2197 | | Cancer |
| HEBCV31 | SEQ ID NO: 2198 | | Cancer |
| HDPOL27 | SEQ ID NO: 2199 | | Cancer |
| HDPOL27 | SEQ ID NO: 2200 | | Cancer |
| HE6DI14 | SEQ ID NO: 2201 | | Cancer |
| HLYAN43 | SEQ ID NO: 2202 | | Cancer |
| HDPUM13 | SEQ ID NO: 2203 | | Cancer |
| HPLAT62 | SEQ ID NO: 2204 | | Cancer |
| HAPQT56 | SEQ ID NO: 2205 | | Cancer |
| HACBG19 | SEQ ID NO: 2206 | | Cancer |
| HACBG19 | SEQ ID NO: 2207 | | Cancer |
| HLYAV34 | SEQ ID NO: 2208 | | Cancer |
| HCNSM85 | SEQ ID NO: 2209 | | Cancer |
| HTOCG60 | SEQ ID NO: 2210 | | Cancer |
| HLYAV34 | SEQ ID NO: 2211 | | Cancer |
| HDPWX42 | SEQ ID NO: 2212 | | Cancer |
| HOFNF53 | SEQ ID NO: 2213 | | Reproductive |
| HOFNF53 | SEQ ID NO: 2214 | | Reproductive |
| HMSEO15 | SEQ ID NO: 2215 | | Cancer |
| HBXFT65 | SEQ ID NO: 2216 | | Cancer |
| HFCEQ37 | SEQ ID NO: 2217 | | Cancer |
| HWNFG66 | SEQ ID NO: 2218 | | Digestive |
| HOHCA60 | SEQ ID NO: 2219 | | Cancer |
| HOHCA60 | SEQ ID NO: 2220 | | Cancer |
| HOHCA60 | SEQ ID NO: 2221 | | Cancer |
| HOHCA60 | SEQ ID NO: 2222 | | Cancer |
| HOHCA60 | SEQ ID NO: 2223 | | Cancer |
| HLDRR08 | SEQ ID NO: 2224 | | Digestive |
| HSKNP59 | SEQ ID NO: 2225 | | Musculoskeletal |
| HSKNP59 | SEQ ID NO: 2226 | | Musculoskeletal |
| HAMHE82 | SEQ ID NO: 2227 | | Cancer |
| HBIOO68 | SEQ ID NO: 2228 | | Cancer |
| HCE3C63 | SEQ ID NO: 2229 | | Mixed Fetal, |
| | | | Neural/Sensory |
| HCNDV12 | SEQ ID NO: 2230 | | Digestive, |
| | | | Reproductive |
| HMWDW68 | SEQ ID NO: 2231 | | Cancer |
| HE2BC57 | SEQ ID NO: 2232 | | Cancer |
| HSDEE58 | SEQ ID NO: 2233 | | Cancer |
| HE9OW91 | SEQ ID NO: 2234 | | Cancer |
| HFCFI20 | SEQ ID NO: 2235 | | Cancer |
| HELEN05 | SEQ ID NO: 2236 | | Cancer |
| HISEL50 | SEQ ID NO: 2237 | | Cancer |
| HLHDL62 | SEQ ID NO: 2238 | | Cancer |
| HDFQB93 | SEQ ID NO: 2239 | | Cancer |
| HLHDQ86 | SEQ ID NO: 2240 | | Cancer |
| HLNAB24 | SEQ ID NO: 2241 | | Immune/Hematopoietic |
| HLYBQ90 | SEQ ID NO: 2242 | | Cancer |
| HLYBQ90 | SEQ ID NO: 2243 | | Cancer |
| HNHDP39 | SEQ ID NO: 2244 | | Endocrine, |
| | | | Immune/Hematopoietic, |
| | | | Reproductive |
| HNTAC64 | SEQ ID NO: 2245 | | Cancer |
| HNTMY29 | SEQ ID NO: 2246 | | Connective/Epithelial, |
| | | | Reproductive |
| HOFOC33 | SEQ ID NO: 2247 | | Reproductive |
| HOFOC33 | SEQ ID NO: 2248 | | Reproductive |
| HTWFK18 | SEQ ID NO: 2249 | | Connective/Epithelial, |
| | | | Immune/Hematopoietic |
| HAPNJ39 | SEQ ID NO: 2250 | | Cancer |
| HDQFU27 | SEQ ID NO: 2251 | | Cancer |
| HETJZ45 | SEQ ID NO: 2252 | | Cancer |
| HTEMX36 | SEQ ID NO: 2253 | | Cancer |
| HNTCH90 | SEQ ID NO: 2254 | | Cancer |
| HWLBP46 | SEQ ID NO: 2255 | | Cancer |
| HA5BM53 | SEQ ID NO: 2256 | | Cancer |
| HMCEH49 | SEQ ID NO: 2257 | | Cancer |
| HKBAL25 | SEQ ID NO: 2258 | | Digestive, |
| | | | Musculoskeletal |
| HE8EF43 | SEQ ID NO: 2259 | | Cancer |
| HE2RN91 | SEQ ID NO: 2260 | | Cancer |
| HTLIO20 | SEQ ID NO: 2261 | | Immune/Hematopoietic, |
| | | | Neural/Sensory |
| HBIMF63 | SEQ ID NO: 2262 | | Reproductive |
| HE9PM90 | SEQ ID NO: 2263 | | Cancer |
| HNTDX22 | SEQ ID NO: 2264 | | Reproductive |
| HHFCE59 | SEQ ID NO: 2265 | | Cancer |
| HCGAD44 | SEQ ID NO: 2266 | | Cancer |
| HSSJJ51 | SEQ ID NO: 2267 | | Cancer |

[0073] In preferred embodiments, the albumin fusion proteins of the invention are capable of a therapeutic activity and/or biologic activity corresponding to the therapeutic activity and/or biologic activity of the Therapeutic protein corresponding to the Therapeutic protein portion of the albumin fusion protein listed in the corresponding row of Table 1. In further preferred embodiments, the therapeutically active protein portions of the albumin fusion proteins of the invention are fragments or variants of the reference sequence cited in the “Exemplary Identifier” column of Table 1, and are capable of the therapeutic activity and/or biologic activity of the corresponding Therapeutic protein.

[0074] Polypeptide and Polynucleotide Fragments and Variants

[0075] Fragments

[0076] The present invention is further directed to fragments of the Therapeutic proteins described in Table 1, albumin proteins, and/or albumin fusion proteins of the invention.

[0077] Even if deletion of one or more amino acids from the N-terminus of a protein results in modification or loss of one or more biological functions of the Therapeutic protein, albumin protein, and/or albumin fusion protein, other Therapeutic activities and/or functional activities (e.g., biological activities, ability to multimerize, ability to bind a ligand) may still be retained. For example, the ability of polypeptides with N-terminal deletions to induce and/or bind to antibodies which recognize the complete or mature forms of the polypeptides generally will be retained when less than the majority of the residues of the complete polypeptide are removed from the N-terminus. Whether a particular polypeptide lacking N-terminal residues of a complete polypeptide retains such immunologic activities can readily be determined by routine methods described herein and otherwise known in the art. It is not unlikely that a mutein with a large number of deleted N-terminal amino acid residues may retain some biological or immunogenic activities. In fact, peptides composed of as few as six amino acid residues may often evoke an immune response.

[0078] Accordingly, fragments of a Therapeutic protein corresponding to a Therapeutic protein portion of an albumin fusion protein of the invention, include the full length protein as well as polypeptides having one or more residues deleted from the amino terminus of the amino acid sequence of the reference polypeptide (i.e., a Therapeutic protein as disclosed in Table 1). In particular, N-terminal deletions may be described by the general formula m−q, where q is a whole integer representing the total number of amino acid residues in a reference polypeptide (e.g., a Therapeutic protein referred to in Table 1), and m is defined as any integer ranging from 2 to q−6. Polynucleotides encoding these polypeptides are also encompassed by the invention.

[0079] In addition, fragments of serum albumin polypeptides corresponding to an albumin protein portion of an albumin fusion protein of the invention, include the full length protein as well as polypeptides having one or more residues deleted from the amino terminus of the amino acid sequence of the reference polypeptide (i.e., serum albumin). In particular, N-terminal deletions may be described by the general formula m⁻⁵⁸⁵, where 585 is a whole integer representing the total number of amino acid residues in serum albumin (SEQ ID NO:18), and m is defined as any integer ranging from 2 to 579. Polynucleotides encoding these polypeptides are also encompassed by the invention.

[0080] Moreover, fragments of albumin fusion proteins of the invention, include the full length albumin fusion protein as well as polypeptides having one or more residues deleted from the amino terminus of the albumin fusion protein. In particular, N-terminal deletions may be described by the general formula m−q, where q is a whole integer representing the total number of amino acid residues in the albumin fusion protein, and m is defined as any integer ranging from 2 to q−6. Polynucleotides encoding these polypeptides are also encompassed by the invention.

[0081] Also as mentioned above, even if deletion of one or more amino acids from the N-terminus or C-terminus of a reference polypeptide (e.g., a Therapeutic protein and/or serum albumin protein) results in modification or loss of one or more biological functions of the protein, other functional activities (e.g., biological activities, ability to multimerize, ability to bind a ligand) and/or Therapeutic activities may still be retained. For example the ability of polypeptides with C-terminal deletions to induce and/or bind to antibodies which recognize the complete or mature forms of the polypeptide generally will be retained when less than the majority of the residues of the complete or mature polypeptide are removed from the C-terminus. Whether a particular polypeptide lacking the N-terminal and/or C-terminal residues of a reference polypeptide retains Therapeutic activity can readily be determined by routine methods described herein and/or otherwise known in the art.

[0082] The present invention further provides polypeptides having one or more residues deleted from the carboxy terminus of the amino acid sequence of a Therapeutic protein corresponding to a Therapeutic protein portion of an albumin fusion protein of the invention (e.g., a Therapeutic protein referred to in Table 1). In particular, C-terminal deletions may be described by the general formula 1−n, where n is any whole integer ranging from 6 to q−1, and where q is a whole integer representing the total number of amino acid residues in a reference polypeptide (e.g., a Therapeutic protein referred to in Table 1). Polynucleotides encoding these polypeptides are also encompassed by the invention.

[0083] In addition, the present invention provides polypeptides having one or more residues deleted from the carboxy terminus of the amino acid sequence of an albumin protein corresponding to an albumin protein portion of an albumin fusion protein of the invention (e.g., serum albumin). In particular, C-terminal deletions may be described by the general formula 1−n, where n is any whole integer ranging from 6 to 584, where 584 is the whole integer representing the total number of amino acid residues in serum albumin (SEQ ID NO: 18) minus 1. Polynucleotides encoding these polypeptides are also encompassed by the invention.

[0084] Moreover, the present invention provides polypeptides having one or more residues deleted from the carboxy terminus of an albumin fusion protein of the invention. In particular, C-terminal deletions may be described by the general formula 1−n, where n is any whole integer ranging from 6 to q−1, and where q is a whole integer representing the total number of amino acid residues in an albumin fusion protein of the invention. Polynucleotides encoding these polypeptides are also encompassed by the invention.

[0085] In addition, any of the above described N- or C-terminal deletions can be combined to produce a N- and C-terminal deleted reference polypeptide. The invention also provides polypeptides having one or more amino acids deleted from both the amino and the carboxyl termini, which may be described generally as having residues m-n of a reference polypeptide (e.g., a Therapeutic protein referred to in Table 1, or serum albumin (e.g., SEQ ID NO: 18), or an albumin fusion protein of the invention) where n and m are integers as described above. Polynucleotides encoding these polypeptides are also encompassed by the invention.

[0086] The present application is also directed to proteins containing polypeptides at least 80%, 85%, 90%, 95%, 96%, 97%, 98% or 99% identical to a reference polypeptide sequence (e.g., a Therapeutic protein, serum albumin protein or an albumin fusion protein of the invention) set forth herein, or fragments thereof. In preferred embodiments, the application is directed to proteins comprising polypeptides at least 80%, 85%, 90%, 95%, 96%, 97%, 98% or 99% identical to reference polypeptides having the amino acid sequence of N- and C-terminal deletions as described above. Polynucleotides encoding these polypeptides are also encompassed by the invention.

[0087] Preferred polypeptide fragments of the invention are fragments comprising, or alternatively, consisting of, an amino acid sequence that displays a Therapeutic activity and/or functional activity (e.g. biological activity) of the polypeptide sequence of the Therapeutic protein or serum albumin protein of which the amino acid sequence is a fragment.

[0088] Other preferred polypeptide fragments are biologically active fragments. Biologically active fragments are those exhibiting activity similar, but not necessarily identical, to an activity of the polypeptide of the present invention. The biological activity of the fragments may include an improved desired activity, or a decreased undesirable activity.

[0089] Variants

[0090] “Variant” refers to a polynucleotide or nucleic acid differing from a reference nucleic acid or polypeptide, but retaining essential properties thereof. Generally, variants are overall closely similar, and, in many regions, identical to the reference nucleic acid or polypeptide.

[0091] As used herein, “variant”, refers to a Therapeutic protein portion of an albumin fusion protein of the invention, albumin portion of an albumin fusion protein of the invention, or albumin fusion protein differing in sequence from a Therapeutic protein (e.g. see “therapeutic” column of Table 1), albumin protein, and/or albumin fusion protein of the invention, respectively, but retaining at least one functional and/or therapeutic property thereof as described elsewhere herein or otherwise known in the art. Generally, variants are overall very similar, and, in many regions, identical to the amino acid sequence of the Therapeutic protein corresponding to a Therapeutic protein portion of an albumin fusion protein of the invention, albumin protein corresponding to an albumin protein portion of an albumin fusion protein of the invention, and/or albumin fusion protein of the invention. Nucleic acids encoding these variants are also encompassed by the invention.

[0092] The present invention is also directed to proteins which comprise, or alternatively consist of, an amino acid sequence which is at least 80%, 85%, 90%, 95%, 96%, 97%, 98%, 99% or 100%, identical to, for example, the amino acid sequence of a Therapeutic protein corresponding to a Therapeutic protein portion of an albumin fusion protein of the invention (e.g., an amino acid sequence disclosed in the “Exemplary Identifier” column of Table 1, or fragments or variants thereof), albumin proteins (e.g., SEQ ID NO:18 or fragments or variants thereof) corresponding to an albumin protein portion of an albumin fusion protein of the invention, and/or albumin fusion proteins of the invention. Fragments of these polypeptides are also provided (e.g., those fragments described herein). Further polypeptides encompassed by the invention are polypeptides encoded by polynucleotides which hybridize to the complement of a nucleic acid molecule encoding an amino acid sequence of the invention under stringent hybridization conditions (e.g., hybridization to filter bound DNA in 6×Sodium chloride/Sodium citrate (SSC) at about 45 degrees Celsius, followed by one or more washes in 0.2×SSC, 0.1% SDS at about 50-65 degrees Celsius), under highly stringent conditions (e.g., hybridization to filter bound DNA in 6×sodium chloride/Sodium citrate (SSC) at about 45 degrees Celsius, followed by one or more washes in 0.1×SSC, 0.2% SDS at about 68 degrees Celsius), or under other stringent hybridization conditions which are known to those of skill in the art (see, for example, Ausubel, F. M. et al., eds., 1989 Current protocol in Molecular Biology, Green publishing associates, Inc., and John Wiley & Sons Inc., New York, at pages 6.3.1-6.3.6 and 2.10.3). Polynucleotides encoding these polypeptides are also encompassed by the invention.

[0093] By a polypeptide having an amino acid sequence at least, for example, 95% “identical” to a query amino acid sequence of the present invention, it is intended that the amino acid sequence of the subject polypeptide is identical to the query sequence except that the subject polypeptide sequence may include up to five amino acid alterations per each 100 amino acids of the query amino acid sequence. In other words, to obtain a polypeptide having an amino acid sequence at least 95% identical to a query amino acid sequence, up to 5% of the amino acid residues in the subject sequence may be inserted, deleted, or substituted with another amino acid. These alterations of the reference sequence may occur at the amino- or carboxy-terminal positions of the reference amino acid sequence or anywhere between those terminal positions, interspersed either individually among residues in the reference sequence or in one or more contiguous groups within the reference sequence.

[0094] As a practical matter, whether any particular polypeptide is at least 80%, 85%, 90%, 95%, 96%, 97%, 98% or 99% identical to, for instance, the amino acid sequence of an albumin fusion protein of the invention or a fragment thereof (such as the Therapeutic protein portion of the albumin fusion protein or the albumin portion of the albumin fusion protein), can be determined conventionally using known computer programs. A preferred method for determining the best overall match between a query sequence (a sequence of the present invention) and a subject sequence, also referred to as a global sequence alignment, can be determined using the FASTDB computer program based on the algorithm of Brutlag et al. (Comp. App. Biosci. 6:237-245 (1990)). In a sequence alignment the query and subject sequences are either both nucleotide sequences or both amino acid sequences. The result of said global sequence alignment is expressed as percent identity. Preferred parameters used in a FASTDB amino acid alignment are: Matrix=PAM 0, k-tuple=2, Mismatch Penalty=1, Joining Penalty=20, Randomization Group Length=0, Cutoff Score=1, Window Size=sequence length, Gap Penalty=5, Gap Size Penalty=0.05, Window Size=500 or the length of the subject amino acid sequence, whichever is shorter.

[0095] If the subject sequence is shorter than the query sequence due to N- or C-terminal deletions, not because of internal deletions, a manual correction must be made to the results. This is because the FASTDB program does not account for N- and C-terminal truncations of the subject sequence when calculating global percent identity. For subject sequences truncated at the N- and C-termini, relative to the query sequence, the percent identity is corrected by calculating the number of residues of the query sequence that are N- and C-terminal of the subject sequence, which are not matched/aligned with a corresponding subject residue, as a percent of the total bases of the query sequence. Whether a residue is matched/aligned is determined by results of the FASTDB sequence alignment. This percentage is then subtracted from the percent identity, calculated by the above FASTDB program using the specified parameters, to arrive at a final percent identity score. This final percent identity score is what is used for the purposes of the present invention. Only residues to the N- and C-termini of the subject sequence, which are not matched/aligned with the query sequence, are considered for the purposes of manually adjusting the percent identity score. That is, only query residue positions outside the farthest N- and C-terminal residues of the subject sequence.

[0096] For example, a 90 amino acid residue subject sequence is aligned with a 100 residue query sequence to determine percent identity. The deletion occurs at the N-terminus of the subject sequence and therefore, the FASTDB alignment does not show a matching/alignment of the first 10 residues at the N-terminus. The 10 unpaired residues represent 10% of the sequence (number of residues at the N- and C-termini not matched/total number of residues in the query sequence) so 10% is subtracted from the percent identity score calculated by the FASTDB program. If the remaining 90 residues were perfectly matched the final percent identity would be 90%. In another example, a 90 residue subject sequence is compared with a 100 residue query sequence. This time the deletions are internal deletions so there are no residues at the N- or C-termini of the subject sequence which are not matched/aligned with the query. In this case the percent identity calculated by FASTDB is not manually corrected. Once again, only residue positions outside the N- and C-terminal ends of the subject sequence, as displayed in the FASTDB alignment, which are not matched/aligned with the query sequence are manually corrected for. No other manual corrections are to made for the purposes of the present invention.

[0097] The variant will usually have at least 75% (preferably at least about 80%, 90%, 95% or 99%) sequence identity with a length of normal HA or Therapeutic protein which is the same length as the variant. Homology or identity at the nucleotide or amino acid sequence level is determined by BLAST (Basic Local Alignment Search Tool) analysis using the algorithm employed by the programs blastp, blastn, blastx, tblastn and tblastx (Karlin et al., Proc. Natl. Acad. Sci. USA 87: 2264-2268 (1990) and Altschul, J. Mol. Evol. 36: 290-300 (1993), fully incorporated by reference) which are tailored for sequence similarity searching.

[0098] The approach used by the BLAST program is to first consider similar segments between a query sequence and a database sequence, then to evaluate the statistical significance of all matches that are identified and finally to summarize only those matches which satisfy a preselected threshold of significance. For a discussion of basic issues in similarity searching of sequence databases, see Altschul et al., (Nature Genetics 6: 119-129 (1994)) which is fully incorporated by reference. The search parameters for histogram, descriptions, alignments, expect (i.e., the statistical significance threshold for reporting matches against database sequences), cutoff, matrix and filter are at the default settings. The default scoring matrix used by blastp, blastx, tblastn, and tblastx is the BLOSUM62 matrix (Henikoff et al., Proc. Natl. Acad. Sci. USA 89: 10915-10919 (1992), fully incorporated by reference). For blastn, the scoring matrix is set by the ratios of M (i.e., the reward score for a pair of matching residues) to N (i.e., the penalty score for mismatching residues), wherein the default values for M and N are 5 and -4, respectively. Four blastn parameters may be adjusted as follows: Q=10 (gap creation penalty); R=10 (gap extension penalty); wink=1 (generates word hits at every wink^{th} position along the query); and gapw—16 (sets the window width within which gapped alignments are generated). The equivalent Blastp parameter settings were Q=9; R=2; wink=1; and gapw=32. A Bestfit comparison between sequences, available in the GCG package version 10.0, uses DNA parameters GAP=50 (gap creation penalty) and LEN=3 (gap extension penalty) and the equivalent settings in protein comparisons are GAP=8 and LEN=2.

[0099] The polynucleotide variants of the invention may contain alterations in the coding regions, non-coding regions, or both. Especially preferred are polynucleotide variants containing alterations which produce silent substitutions, additions, or deletions, but do not alter the properties or activities of the encoded polypeptide. Nucleotide variants produced by silent substitutions due to the degeneracy of the genetic code are preferred. Moreover, polypeptide variants in which less than 50, less than 40, less than 30, less than 20, less than 10, or 5-50, 5-25, 5-10, 1-5, or 1-2 amino acids are substituted, deleted, or added in any combination are also preferred. Polynucleotide variants can be produced for a variety of reasons, e.g., to optimize codon expression for a particular host (change codons in the human mRNA to those preferred by a bacterial host, such as, yeast or E. coli).

[0100] In a preferred embodiment, a polynucleotide encoding an albumin portion of an albumin fusion protein of the invention is optimized for expression in yeast or mammalian cells. In further preferred embodiment, a polynucleotide encoding a Therapeutic protein portion of an albumin fusion protein of the invention is optimized for expression in yeast or mammalian cells. In a still further preferred embodiment, a polynucleotide encoding an albumin fusion protein of the invention is optimized for expression in yeast or mammalian cells.

[0101] In an alternative embodiment, a codon optimized polynucleotide encoding a Therapeutic protein portion of an albumin fusion protein of the invention does not hybridize to the wild type polynucleotide encoding the Therapeutic protein under stringent hybridization conditions as described herein. In a further embodiment, a codon optimized polynucleotide encoding an albumin portion of an albumin fusion protein of the invention do not hybridize to the wild type polynucleotide encoding the albumin protein under stringent hybridization conditions as described herein. In another embodiment, a codon optimized polynucleotide encoding an albumin fusion protein of the invention do not hybridize to the wild type polynucleotide encoding the Therapeutic protein portin or the albumin protein portion under stringent hybridization conditions as described herein.

[0102] In an additional embodiment, polynucleotides encoding a Therapeutic protein portion of an albumin fusion protein of the invention do not comprise, or alternatively consist of, the naturally occurring sequence of that Therapeutic protein. In a further embodiment, polynucleotides encoding an albumin protein portion of an albumin fusion protein of the invention do not comprise, or alternatively consist of, the naturally occurring sequence of albumin protein. In an alternative embodiment, polynucleotides encoding an albumin fusion protein of the invention do not comprise, or alternatively consist of, the naturally occurring sequence of a Therapeutic protein portion or the albumin protein portion.

[0103] Naturally occurring variants are called “allelic variants,” and refer to one of several alternate forms of a gene occupying a given locus on a chromosome of an organism. (Genes II, Lewin, B., ed., John Wiley & Sons, New York (1985)). These allelic variants can vary at either the polynucleotide and/or polypeptide level and are included in the present invention. Alternatively, non-naturally occurring variants may be produced by mutagenesis techniques or by direct synthesis.

[0104] Using known methods of protein engineering and recombinant DNA technology, variants may be generated to improve or alter the characteristics of the polypeptides of the present invention. For instance, one or more amino acids can be deleted from the N-terminus or C-terminus of the polypeptide of the present invention without substantial loss of biological function. As an example, Ron et al. (J. Biol. Chem. 268: 2984-2988 (1993)) reported variant KGF proteins having heparin binding activity even after deleting 3, 8, or 27 amino-terminal amino acid residues. Similarly, Interferon gamma exhibited up to ten times higher activity after deleting 8-10 amino acid residues from the carboxy terminus of this protein. (Dobeli et al., J. Biotechnology 7:199-216 (1988).)

[0105] Moreover, ample evidence demonstrates that variants often retain a biological activity similar to that of the naturally occurring protein. For example, Gayle and coworkers (J. Biol. Chem. 268:22105-22111 (1993)) conducted extensive mutational analysis of human cytokine IL-1a. They used random mutagenesis to generate over 3,500 individual IL-1a mutants that averaged 2.5 amino acid changes per variant over the entire length of the molecule. Multiple mutations were examined at every possible amino acid position. The investigators found that “[m]ost of the molecule could be altered with little effect on either [binding or biological activity].” In fact, only 23 unique amino acid sequences, out of more than 3,500 nucleotide sequences examined, produced a protein that significantly differed in activity from wild-type.

[0106] Furthermore, even if deleting one or more amino acids from the N-terminus or C-terminus of a polypeptide results in modification or loss of one or more biological functions, other biological activities may still be retained. For example, the ability of a deletion variant to induce and/or to bind antibodies which recognize the secreted form will likely be retained when less than the majority of the residues of the secreted form are removed from the N-terminus or C-terminus. Whether a particular polypeptide lacking N- or C-terminal residues of a protein retains such immunogenic activities can readily be determined by routine methods described herein and otherwise known in the art.

[0107] Thus, the invention further includes polypeptide variants which have a functional activity (e.g., biological activity and/or therapeutic activity). In highly preferred embodiments the invention provides variants of albumin fusion proteins that have a functional activity (e.g., biological activity and/or therapeutic activity) that corresponds to one or more biological and/or therapeutic activities of the Therapeutic protein corresponding to the Therapeutic protein portion of the albumin fusion protein. Such variants include deletions, insertions, inversions, repeats, and substitutions selected according to general rules known in the art so as have little effect on activity.

[0108] In preferred embodiments, the variants of the invention have conservative substitutions. By “conservative substitutions” is intended swaps within groups such as replacement of the aliphatic or hydrophobic amino acids Ala, Val, Leu and Ile; replacement of the hydroxyl residues Ser and Thr; replacement of the acidic residues Asp and Glu; replacement of the amide residues Asn and Gln, replacement of the basic residues Lys, Arg, and His; replacement of the aromatic residues Phe, Tyr, and Trp, and replacement of the small-sized amino acids Ala, Ser, Thr, Met, and Gly.

[0109] Guidance concerning how to make phenotypically silent amino acid substitutions is provided, for example, in Bowie et al., “Deciphering the Message in Protein Sequences: Tolerance to Amino Acid Substitutions,” Science 247:1306-1310 (1990), wherein the authors indicate that there are two main strategies for studying the tolerance of an amino acid sequence to change.

[0110] The first strategy exploits the tolerance of amino acid substitutions by natural selection during the process of evolution. By comparing amino acid sequences in different species, conserved amino acids can be identified. These conserved amino acids are likely important for protein function. In contrast, the amino acid positions where substitutions have been tolerated by natural selection indicates that these positions are not critical for protein function. Thus, positions tolerating amino acid substitution could be modified while still maintaining biological activity of the protein.

[0111] The second strategy uses genetic engineering to introduce amino acid changes at specific positions of a cloned gene to identify regions critical for protein function. For example, site directed mutagenesis or alanine-scanning mutagenesis (introduction of single alanine mutations at every residue in the molecule) can be used. See Cunningham and Wells, Science 244:1081-1085 (1989). The resulting mutant molecules can then be tested for biological activity.

[0112] As the authors state, these two strategies have revealed that proteins are surprisingly tolerant of amino acid substitutions. The authors further indicate which amino acid changes are likely to be permissive at certain amino acid positions in the protein. For example, most buried (within the tertiary structure of the protein) amino acid residues require nonpolar side chains, whereas few features of surface side chains are generally conserved. Moreover, tolerated conservative amino acid substitutions involve replacement of the aliphatic or hydrophobic amino acids Ala, Val, Leu and Ile; replacement of the hydroxyl residues Ser and Thr; replacement of the acidic residues Asp and Glu; replacement of the amide residues Asn and Gln, replacement of the basic residues Lys, Arg, and His; replacement of the aromatic residues Phe, Tyr, and Trp, and replacement of the small-sized amino acids Ala, Ser, Thr, Met, and Gly. Besides conservative amino acid substitution, variants of the present invention include (i) polypeptides containing substitutions of one or more of the non-conserved amino acid residues, where the substituted amino acid residues may or may not be one encoded by the genetic code, or (ii) polypeptides containing substitutions of one or more of the amino acid residues having a substituent group, or (iii) polypeptides which have been fused with or chemically conjugated to another compound, such as a compound to increase the stability and/or solubility of the polypeptide (for example, polyethylene glycol), (iv) polypeptide containing additional amino acids, such as, for example, an IgG Fc fusion region peptide. Such variant polypeptides are deemed to be within the scope of those skilled in the art from the teachings herein.

[0113] For example, polypeptide variants containing amino acid substitutions of charged amino acids with other charged or neutral amino acids may produce proteins with improved characteristics, such as less aggregation. Aggregation of pharmaceutical formulations both reduces activity and increases clearance due to the aggregate's immunogenic activity. See Pinckard et al., Clin. Exp. Immunol. 2:331-340 (1967); Robbins et al., Diabetes 36: 838-845 (1987); Cleland et al., Crit. Rev. Therapeutic Drug Carrier Systems 10:307-377 (1993).

[0114] In specific embodiments, the polypeptides of the invention comprise, or alternatively, consist of, fragments or variants of the amino acid sequence of a Therapeutic protein described herein and/or human serum albumin, and/or albumin fusion protein of the invention, wherein the fragments or variants have 1-5, 5-10, 5-25, 5-50, 10-50 or 50-150, amino acid residue additions, substitutions, and/or deletions when compared to the reference amino acid sequence. In preferred embodiments, the amino acid substitutions are conservative. Nucleic acids encoding these polypeptides are also encompassed by the invention.

[0115] The polypeptide of the present invention can be composed of amino acids joined to each other by peptide bonds or modified peptide bonds, i.e., peptide isosteres, and may contain amino acids other than the 20 gene-encoded amino acids. The polypeptides may be modified by either natural processes, such as post-translational processing, or by chemical modification techniques which are well known in the art. Such modifications are well described in basic texts and in more detailed monographs, as well as in a voluminous research literature. Modifications can occur anywhere in a polypeptide, including the peptide backbone, the amino acid side-chains and the amino or carboxyl termini. It will be appreciated that the same type of modification may be present in the same or varying degrees at several sites in a given polypeptide. Also, a given polypeptide may contain many types of modifications. Polypeptides may be branched, for example, as a result of ubiquitination, and they may be cyclic, with or without branching. Cyclic, branched, and branched cyclic polypeptides may result from posttranslation natural processes or may be made by synthetic methods. Modifications include acetylation, acylation, ADP-ribosylation, amidation, covalent attachment of flavin, covalent attachment of a heme moiety, covalent attachment of a nucleotide or nucleotide derivative, covalent attachment of a lipid or lipid derivative, covalent attachment of phosphotidylinositol, cross-linking, cyclization, disulfide bond formation, demethylation, formation of covalent cross-links, formation of cysteine, formation of pyroglutamate, formylation, gamma-carboxylation, glycosylation, GPI anchor formation, hydroxylation, iodination, methylation, myristylation, oxidation, pegylation, proteolytic processing, phosphorylation, prenylation, racemization, selenoylation, sulfation, transfer-RNA mediated addition of amino acids to proteins such as arginylation, and ubiquitination. (See, for instance, PROTEINS—STRUCTURE AND MOLECULAR PROPERTIES, 2nd Ed., T. E. Creighton, W. H. Freeman and Company, New York (1993); POST-TRANSLATIONAL COVALENT MODIFICATION OF PROTEINS, B. C. Johnson, Ed., Academic Press, New York, pgs. 1-12 (1983); Seifter et al., Meth. Enzymol. 182:626-646 (1990); Rattan et al., Ann. N.Y. Acad. Sci. 663:48-62 (1992)).

[0116] Functional Activity

[0117] “A polypeptide having functional activity” refers to a polypeptide capable of displaying one or more known functional activities associated with the full-length, pro-protein, and/or mature form of a Therapeutic protein. Such functional activities include, but are not limited to, biological activity, antigenicity [ability to bind (or compete with a polypeptide for binding) to an anti-polypeptide antibody], immunogenicity (ability to generate antibody which binds to a specific polypeptide of the invention), ability to form multimers with polypeptides of the invention, and ability to bind to a receptor or ligand for a polypeptide.

[0118] “A polypeptide having biological activity” refers to a polypeptide exhibiting activity similar to, but not necessarily identical to, an activity of a Therapeutic protein of the present invention, including mature forms, as measured in a particular biological assay, with or without dose dependency. In the case where dose dependency does exist, it need not be identical to that of the polypeptide, but rather substantially similar to the dose-dependence in a given activity as compared to the polypeptide of the present invention (i.e., the candidate polypeptide will exhibit greater activity or not more than about 25-fold less and, preferably, not more than about tenfold less activity, and most preferably, not more than about three-fold less activity relative to the polypeptide of the present invention).

[0119] In preferred embodiments, an albumin fusion protein of the invention has at least one biological and/or therapeutic activity associated with the Therapeutic protein (or fragment or variant thereof) when it is not fused to albumin.

[0120] The albumin fusion proteins of the invention can be assayed for functional activity (e.g., biological activity) using or routinely modifying assays known in the art, as well as assays described herein. Additionally, one of skill in the art may routinely assay fragments of a Therapeutic protein corresponding to a Therapeutic protein portion of an albumin fusion protein of the invention, for activity using assays referenced in its corresponding row of Table 1. Further, one of skill in the art may routinely assay fragments of an albumin protein corresponding to an albumin protein portion of an albumin fusion protein of the invention, for activity using assays known in the art and/or as described in the Examples section below.

[0121] For example, in one embodiment where one is assaying for the ability of an albumin fusion protein of the invention to bind or compete with a Therapeutic protein for binding to an anti-Therapeutic polypeptide antibody and/or anti-albumin antibody, various immunoassays known in the art can be used, including but not limited to, competitive and non-competitive assay systems using techniques such as radioimmunoassays, ELISA (enzyme linked immunosorbent assay), “sandwich” immunoassays, immunoradiometric assays, gel diffusion precipitation reactions, immunodiffusion assays, in situ immunoassays (using colloidal gold, enzyme or radioisotope labels, for example), western blots, precipitation reactions, agglutination assays (e.g., gel agglutination assays, hemagglutination assays), complement fixation assays, immunofluorescence assays, protein A assays, and immunoelectrophoresis assays, etc. In one embodiment, antibody binding is detected by detecting a label on the primary antibody. In another embodiment, the primary antibody is detected by detecting binding of a secondary antibody or reagent to the primary antibody. In a further embodiment, the secondary antibody is labeled. Many means are known in the art for detecting binding in an immunoassay and are within the scope of the present invention.

[0122] In a preferred embodiment, where a binding partner (e.g., a receptor or a ligand) of a Therapeutic protein is identified, binding to that binding partner by an albumin fusion protein containing that Therapeutic protein as the Therapeutic protein portion of the fusion can be assayed, e.g., by means well-known in the art, such as, for example, reducing and non-reducing gel chromatography, protein affinity chromatography, and affinity blotting. See generally, Phizicky et al., Microbiol. Rev. 59:94-123 (1995). In another embodiment, the ability of physiological correlates of an albumin fusion protein of the present invention to bind to a substrate(s) of the Therapeutic polypeptide corresponding to the Therapeutic portion of the albumin fusion protein of the invention can be routinely assayed using techniques known in the art.

[0123] In an alternative embodiment, where the ability of an albumin fusion protein of the invention to multimerize is being evaluated, association with other components of the multimer can be assayed, e.g., by means well-known in the art, such as, for example, reducing and non-reducing gel chromatography, protein affinity chromatography, and affinity blotting. See generally, Phizicky et al., supra.

[0124] In preferred embodiments, an albumin fusion protein of the invention comprising all or a portion of an antibody that binds a Therapeutic protein, has at least one biological and/or therapeutic activity (e.g., to specifically bind a polypeptide or epitope) associated with the antibody that binds a Therapeutic protein (or fragment or variant thereof) when it is not fused to albumin. In other preferred embodiments, the biological activity and/or therapeutic activity of an albumin fusion protein of the invention comprising all or a portion of an antibody that binds a Therapeutic protein is the inhibition (i.e. antagonism) or activation (i.e., agonism) of one or more of the biological activities and/or therapeutic activities associated with the polypeptide that is specifically bound by antibody that binds a Therapeutic protein.

[0125] Albumin fusion proteins of the invention (e.g., comprising at least a fragment or variant of an antibody that binds a Therapeutic protein) may be characterized in a variety of ways. In particular, albumin fusion proteins of the invention comprising at least a fragment or variant of an antibody that binds a Therapeutic protein may be assayed for the ability to specifically bind to the same antigens specifically bound by the antibody that binds a Therapeutic protein corresponding to the Therapeutic protein portion of the albumin fusion protein using techniques described herein or routinely modifying techniques known in the art.

[0126] Assays for the ability of the albumin fusion proteins of the invention (e.g., comprising at least a fragment or variant of an antibody that binds a Therapeutic protein) to (specifically) bind a specific protein or epitope may be performed in solution (e.g., Houghten, Bio/Techniques 13:412-421(1992)), on beads (e.g., Lam, Nature 354:82-84 (1991)), on chips (e.g., Fodor, Nature 364:555-556 (1993)), on bacteria (e.g., U.S. Pat. No. 5,223,409), on spores (e.g., Patent Nos. 5,571,698; 5,403,484; and 5,223,409), on plasmids (e.g., Cull et al., Proc. Natl. Acad. Sci. USA 89:1865-1869 (1992)) or on phage (e.g., Scott and Smith, Science 249:386-390 (1990); Devlin, Science 249:404-406 (1990); Cwirla et al., Proc. Natl. Acad. Sci. USA 87:6378-6382 (1990); and Felici, J. Mol. Biol. 222:301-310 (1991)) (each of these references is incorporated herein in its entirety by reference). Albumin fusion proteins of the invention comprising at least a fragment or variant of a Therapeutic antibody may also be assayed for their specificity and affinity for a specific protein or epitope using or routinely modifying techniques described herein or otherwise known in the art.

[0127] The albumin fusion proteins of the invention comprising at least a fragment or variant of an antibody that binds a Therapeutic protein may be assayed for cross-reactivity with other antigens (e.g., molecules that have sequence/structure conservation with the molecule(s) specifically bound by the antibody that binds a Therapeutic protein (or fragment or variant thereof) corresponding to the Therapeutic protein portion of the albumin fusion protein of the invention) by any method known in the art.

[0128] Immunoassays which can be used to analyze (immunospecific) binding and cross-reactivity include, but are not limited to, competitive and non-competitive assay systems using techniques such as western blots, radioimmunoassays, ELISA (enzyme linked immunosorbent assay), “sandwich” immunoassays, immunoprecipitation assays, precipitin reactions, gel diffusion precipitin reactions, immunodiffusion assays, agglutination assays, complement-fixation assays, immunoradiometric assays, fluorescent immunoassays, and protein A immunoassays, to name but a few. Such assays are routine and well known in the art (see, e.g., Ausubel et al, eds, 1994, Current Protocols in Molecular Biology, Vol. 1, John Wiley & Sons, Inc., New York, which is incorporated by reference herein in its entirety). Exemplary immunoassays are described briefly below (but are not intended by way of limitation).

[0129] Immunoprecipitation protocols generally comprise lysing a population of cells in a lysis buffer such as RIPA buffer (1% NP-40 or Triton X-100, 1% sodium deoxycholate, 0.1% SDS, 0.15 M NaCl, 0.01 M sodium phosphate at pH 7.2, 1% Trasylol) supplemented with protein phosphatase and/or protease inhibitors (e.g., EDTA, PMSF, aprotinin, sodium vanadate), adding the albumin fusion protein of the invention (e.g., comprising at least a fragment or variant of an antibody that binds a Therapeutic protein) to the cell lysate, incubating for a period of time (e.g., 1 to 4 hours) at 40 degrees C., adding sepharose beads coupled to an anti-albumin antibody, for example, to the cell lysate, incubating for about an hour or more at 40 degrees C., washing the beads in lysis buffer and resuspending the beads in SDS/sample buffer. The ability of the albumin fusion protein of the invention to immunoprecipitate a particular antigen can be assessed by, e.g. western blot analysis. One of skill in the art would be knowledgeable as to the parameters that can be modified to increase the binding of the albumin fusion protein to an antigen and decrease the background (e.g., pre-clearing the cell lysate with sepharose beads). For further discussion regarding immunoprecipitation protocols see, e.g., Ausubel et al, eds, 1994, Current Protocols in Molecular Biology, Vol. 1, John Wiley & Sons, Inc., New York at 10. 16.1.

[0130] Western blot analysis generally comprises preparing protein samples, electrophoresis of the protein samples in a polyacrylamide gel (e.g., 8%-20% SDS-PAGE depending on the molecular weight of the antigen), transferring the protein sample from the polyacrylamide gel to a membrane such as nitrocellulose, PVDF or nylon, blocking the membrane in blocking solution (e.g., PBS with 3% BSA or non-fat milk), washing the membrane in washing buffer (e.g., PBS-Tween 20), applying the albumin fusion protein of the invention (diluted in blocking buffer) to the membrane, washing the membrane in washing buffer, applying a secondary antibody (which recognizes the albumin fusion protein, e.g., an anti-human serum albumin antibody) conjugated to an enzymatic substrate (e.g., horseradish peroxidase or alkaline phosphatase) or radioactive molecule (e.g., ³²P or ¹²⁵I) diluted in blocking buffer, washing the membrane in wash buffer, and detecting the presence of the antigen. One of skill in the art would be knowledgeable as to the parameters that can be modified to increase the signal detected and to reduce the background noise. For further discussion regarding western blot protocols see, e.g., Ausubel et al, eds, 1994, Current Protocols in Molecular Biology, Vol. 1, John Wiley & Sons, Inc., New York at 10.8.1.

[0131] ELISAs comprise preparing antigen, coating the well of a 96-well microtiter plate with the antigen, washing away antigen that did not bind the wells, adding the albumin fusion protein (e.g., comprising at least a fragment or variant of an antibody that binds a Therapeutic protein) of the invention conjugated to a detectable compound such as an enzymatic substrate (e.g., horseradish peroxidase or alkaline phosphatase) to the wells and incubating for a period of time, washing away unbound or non-specifically bound albumin fusion proteins, and detecting the presence of the albumin fusion proteins specifically bound to the antigen coating the well. In ELISAs the albumin fusion protein does not have to be conjugated to a detectable compound; instead, a second antibody (which recognizes albumin fusion protein) conjugated to a detectable compound may be added to the well. Further, instead of coating the well with the antigen, the albumin fusion protein may be coated to the well. In this case, the detectable molecule could be the antigen conjugated to a detectable compound such as an enzymatic substrate (e.g., horseradish peroxidase or alkaline phosphatase). One of skill in the art would be knowledgeable as to the parameters that can be modified to increase the signal detected as well as other variations of ELISAs known in the art. For further discussion regarding ELISAs see, e.g., Ausubel et al, eds, 1994, Current Protocols in Molecular Biology, Vol. 1, John Wiley & Sons, Inc., New York at 11.2.1.

[0132] The binding affinity of an albumin fusion protein to a protein, antigen, or epitope and the off-rate of an albumin fusion protein-protein/antigen/epitope interaction can be determined by competitive binding assays. One example of a competitive binding assay is a radioimmunoassay comprising the incubation of labeled antigen (e.g., ³H or ¹²⁵I) with the albumin fusion protein of the invention in the presence of increasing amounts of unlabeled antigen, and the detection of the antibody bound to the labeled antigen. The affinity of the albumin fusion protein of the present invention for a specific protein, antigen, or epitope and the binding off-rates can be determined from the data by Scatchard plot analysis. Competition with a second protein that binds the same protein, antigen or epitope as the albumin fusion protein, can also be determined using radioimmunoassays. In this case, the protein, antigen or epitope is incubated with an albumin fusion protein of the present invention conjugated to a labeled compound (e.g., ³H or ¹²⁵I) in the presence of increasing amounts of an unlabeled second protein that binds the same protein, antigen, or epitope as the albumin fusion protein of the invention.

[0133] In a preferred embodiment, BIAcore kinetic analysis is used to determine the binding on and off rates of albumin fusion proteins of the invention to a protein, antigen or epitope. BIAcore kinetic analysis comprises analyzing the binding and dissociation of albumin fusion proteins, or specific polypeptides, antigens or epitopes from chips with immobilized specific polypeptides, antigens or epitopes or albumin fusion proteins, respectively, on their surface.

[0134] Antibodies that bind a Therapeutic protein corresponding to the Therapeutic protein portion of an albumin fusion protein of the invention may also be described or specified in terms of their binding affinity for a given protein or antigen, preferably the antigen which they specifically bind. Preferred binding affinities include those with a dissociation constant or Kd less than 5×10⁻² M, 10⁻² M, 5×10⁻³ M, 10⁻³ M, 5×10⁻⁴ M, 10⁻⁴ M. More preferred binding affinities include those with a dissociation constant or Kd less than 5×10⁻⁵ M, 10⁻⁵M, 5×10⁻⁶ M, 10⁻⁶M, 5×10⁻⁷ M, 10⁷ M, 5×10⁻⁸ M or 10⁻⁸ M. Even more preferred binding affinities include those with a dissociation constant or Kd less than 5×10⁻⁹ M, 10⁻⁹ M, 5×10⁻ M, 10⁻¹⁰ M, 5×10⁻¹¹ M, 10⁻¹¹ M, 5×10⁻¹² M, 10⁻¹² M, 5×10⁻¹³ M, 10⁻¹³ M, 5×10⁻¹⁴ M, 10⁻¹⁴ M, 5×10⁻¹⁵ M, or 10⁻¹⁵ M. In preferred embodiments, albumin fusion proteins comprising at least a fragment or variant of an antibody that binds a Therapeutic protein, has an affinity for a given protein or epitope similar to that of the corresponding antibody (not fused to albumin) that binds a Therapeutic protein, taking into account the valency of the albumin fusion protein (comprising at least a fragment or variant of an antibody that binds a Therapeutic protein) and the valency of the corresponding antibody. In addition, assays described herein (see Examples and Table 1) and otherwise known in the art may routinely be applied to measure the ability of albumin fusion proteins of the present invention and fragments, variants and derivatives thereof to elicit biological activity and/or Therapeutic activity (either in vitro or in vivo) related to either the Therapeutic protein portion and/or albumin portion of the albumin fusion protein of the present invention. Other methods will be known to the skilled artisan and are within the scope of the invention.

[0135] Albumin

[0136] As described above, an albumin fusion protein of the invention comprises at least a fragment or variant of a Therapeutic protein and at least a fragment or variant of human serum albumin, which are associated with one another, preferably by genetic fusion or chemical conjugation.

[0137] The terms, human serum albumin (HSA) and human albumin (HA) are used interchangeably herein. The terms, “albumin and “serum albumin” are broader, and encompass human serum albumin (and fragments and variants thereof) as well as albumin from other species (and fragments and variants thereof).

[0138] As used herein, “albumin” refers collectively to albumin protein or amino acid sequence, or an albumin fragment or variant, having one or more functional activities (e.g., biological activities) of albumin. In particular, “albumin” refers to human albumin or fragments thereof (see EP 201 239, EP 322 094 WO 97/24445, WO95/23857) especially the mature form of human albumin as shown in FIG. 15 and SEQ ID NO: 18, or albumin from other vertebrates or fragments thereof, or analogs or variants of these molecules or fragments thereof.

[0139] In preferred embodiments, the human serum albumin protein used in the albumin fusion proteins of the invention contains one or both of the following sets of point mutations with reference to SEQ ID NO:18: Leu-407 to Ala, Leu-408 to Val, Val-409 to Ala, and Arg-410 to Ala; or Arg-410 to A, Lys-413 to Gln, and Lys-414 to Gln (see, e.g., International Publication No. WO95/23857, hereby incorporated in its entirety by reference herein). In even more preferred embodiments, albumin fusion proteins of the invention that contain one or both of above-described sets of point mutations have improved stability/resistance to yeast Yap3p proteolytic cleavage, allowing increased production of recombinant albumin fusion proteins expressed in yeast host cells.

[0140] As used herein, a portion of albumin sufficient to prolong the therapeutic activity or shelf-life of the Therapeutic protein refers to a portion of albumin sufficient in length or structure to stabilize or prolong the therapeutic activity of the protein so that the shelf life of the Therapeutic protein portion of the albumin fusion protein is prolonged or extended compared to the shelf-life in the non-fusion state. The albumin portion of the albumin fusion proteins may comprise the full length of the HA sequence as described above or as shown in FIG. 15, or may include one or more fragments thereof that are capable of stabilizing or prolonging the therapeutic activity. Such fragments may be of 10 or more amino acids in length or may include about 15, 20, 25, 30, 50, or more contiguous amino acids from the HA sequence or may include part or all of specific domains of HA. For instance, one or more fragments of HA spanning the first two immunoglobulin-like domains may be used.

[0141] The albumin portion of the albumin fusion proteins of the invention may be a variant of normal HA. The Therapeutic protein portion of the albumin fusion proteins of the invention may also be variants of the Therapeutic proteins as described herein. The term “variants” includes insertions, deletions and substitutions, either conservative or non conservative, where such changes do not substantially alter one or more of the oncotic, useful ligand-binding and non-immunogenic properties of albumin, or the active site, or active domain which confers the therapeutic activities of the Therapeutic proteins.

[0142] In particular, the albumin fusion proteins of the invention may include naturally occurring polymorphic variants of human albumin and fragments of human albumin, for example those fragments disclosed in EP 322 094 (namely HA (Pn), where n is 369 to 419). The albumin may be derived from any vertebrate, especially any mammal, for example human, cow, sheep, or pig. Non-mammalian albumins include, but are not limited to, hen and salmon. The albumin portion of the albumin fusion protein may be from a different animal than the Therapeutic protein portion.

[0143] Generally speaking, an HA fragment or variant will be at least 100 amino acids long, preferably at least 150 amino acids long. The HA variant may consist of or alternatively comprise at least one whole domain of HA, for example domains 1 (amino acids 1-194 of SEQ ID NO:18), 2 (amino acids 195-387 of SEQ ID NO:18), 3 (amino acids 388-585 of SEQ ID NO:18), 1+2 (1-387 of SEQ ID NO:18), 2+3 (195-585 of SEQ ID NO:18) or 1+3 (amino acids 1-194 of SEQ ID NO:18+amino acids 388-585 of SEQ ID NO:18). Each domain is itself made up of two homologous subdomains namely 1-105, 120-194, 195-291, 316-387, 388-491 and 512-585, with flexible inter-subdomain linker regions comprising residues Lys106 to Glu119, Glu292 to Val315 and Glu492 to Ala511.

[0144] Preferably, the albumin portion of an albumin fusion protein of the invention comprises at least one subdomain or domain of HA or conservative modifications thereof. If the fusion is based on subdomains, some or all of the adjacent linker is preferably used to link to the Therapeutic protein moiety.

[0145] Antibodies that Specifically Bind Therapeutic Proteins are also Therapeutic Proteins

[0146] The present invention also encompasses albumin fusion proteins that comprise at least a fragment or variant of an antibody that specifically binds a Therapeutic protein disclosed in Table 1. It is specifically contemplated that the term “Therapeutic protein” encompasses antibodies that bind a Therapeutic protein (e.g., as Described in column I of Table 1) and fragments and variants thereof. Thus an albumin fusion protein of the invention may contain at least a fragment or variant of a Therapeutic protein, and/or at least a fragment or variant of an an antibody that binds a Therapeutic protein.

[0147] Antibody Structure and Background

[0148] The basic antibody structural unit is known to comprise a tetramer. Each tetramer is composed of two identical pairs of polypeptide chains, each pair having one “light” (about 25 kDa) and one “heavy” chain (about 50-70 kDa). The amino-terminal portion of each chain includes a variable region of about 100 to 110 or more amino acids primarily responsible for antigen recognition. The carboxy-terminal portion of each chain defines a constant region primarily responsible for effector function. Human light chains are classified as kappa and lambda light chains. Heavy chains are classified as mu, delta, gamma, alpha, or epsilon, and define the antibody's isotype as IgM, IgD, 1gG, IgA, and IgE, respectively. See generally, Fundamental Immunology Chapters 3-5 (Paul, W., ed., 4th ed. Raven Press, N.Y. (1998)) (incorporated by reference in its entirety for all purposes). The variable regions of each light/heavy chain pair form the antibody binding site.

[0149] Thus, an intact IgG antibody has two binding sites. Except in bifunctional or bispecific antibodies, the two binding sites are the same.

[0150] The chains all exhibit the same general structure of relatively conserved framework regions (FR) joined by three hypervariable regions, also called complementarity determining regions or CDRs. The CDR regions, in general, are the portions of the antibody which make contact with the antigen and determine its specificity. The CDRs from the heavy and the light chains of each pair are aligned by the framework regions, enabling binding to a specific epitope. From N-terminal to C-terminal, both light and heavy chains variable regions comprise the domains FR1, CDR1, FR2, CDR2, FR3, CDR3 and FR4. The variable regions are connected to the heavy or light chain constant region. The assignment of amino acids to each domain is in accordance with the definitions of Kabat Sequences of Proteins of Immunological Interest (National Institutes of Health, Bethesda, Md. (1987 and 1991)), or Chothia & Lesk J. Mol. Biol. 196:901-917 (1987); Chothia et al. Nature 342:878-883 (1989).

[0151] As used herein, “antibody” refers to immunoglobulin molecules and immunologically active portions of immunoglobulin molecules, i.e., molecules that contain an antigen binding site that specifically binds an antigen (e.g., a molecule containing one or more CDR regions of an antibody). Antibodies that may correspond to a Therapeutic protein portion of an albumin fusion protein include, but are not limited to, monoclonal, multispecific, human, humanized or chimeric antibodies, single chain antibodies (e.g., single chain Fvs), Fab fragments, F(ab′) fragments, fragments produced by a Fab expression library, anti-idiotypic (anti-Id) antibodies (including, e.g., anti-Id antibodies specific to antibodies of the invention), and epitope-binding fragments of any of the above (e.g., VH domains, VL domains, or one or more CDR regions).

[0152] Antibodies that Bind Therapeutic Proteins

[0153] The present invention encompasses albumin fusion proteins that comprise at least a fragment or variant of an antibody that binds a Therapeutic Protein (e.g., as disclosed in Table 1) or fragment or variant thereof.

[0154] Antibodies that bind a Therapeutic protein (or fragment or variant thereof) may be from any animal origin, including birds and mammals. Preferably, the antibodies are human, murine (e.g., mouse and rat), donkey, sheep, rabbit, goat, guinea pig, camel, horse, or chicken antibodies. Most preferably, the antibodies are human antibodies. As used herein, “human” antibodies include antibodies having the amino acid sequence of a human immunoglobulin and include antibodies isolated from human immunoglobulin libraries and xenomice or other organisms that have been genetically engineered to produce human antibodies.

[0155] The antibody molecules that bind to a Therapeutic protein and that may correspond to a Therapeutic protein portion of an albumin fusion protein of the invention can be of any type (e.g., IgG, IgE, IgM, IgD, IgA and IgY), class (e.g., IgG1, IgG2, IgG3, IgG4, IgA1 and IgA2) or subclass of immunoglobulin molecule. In preferred embodiments, the antibody molecules that bind to a Therapeutic protein and that may correspond to a Therapeutic protein portion of an albumin fusion protein of the invention are IgG1. In other preferred embodiments, the immunoglobulin molecules that bind to a Therapeutic protein and that may correspond to a Therapeutic protein portion of an albumin fusion protein of the invention are IgG2. In other preferred embodiments, the immunoglobulin molecules that bind to a Therapeutic protein and that may correspond to a Therapeutic protein portion of an albumin fusion protein of the invention are IgG4.

[0156] Most preferably the antibodies that bind to a Therapeutic protein and that may correspond to a Therapeutic protein portion of an albumin fusion protein of the invention are human antigen-binding antibody fragments of the present invention and include, but are not limited to, Fab, Fab′ and F(ab′)₂, Fd, single-chain Fvs (scFv), single-chain antibodies, disulfide-linked Fvs (sdFv) and fragments comprising either a VL or VH domain. Antigen-binding antibody fragments, including single-chain antibodies, may comprise the variable region(s) alone or in combination with the entirety or a portion of the following: hinge region, CH1, CH2, and CH3 domains.

[0157] The antibodies that bind to a Therapeutic protein and that may correspond to a Therapeutic protein portion of an albumin fusion protein of the invention may be monospecific, bispecific, trispecific or of greater multispecificity. Multispecific antibodies may be specific for different epitopes of a Therapeutic protein or may be specific for both a Therapeutic protein as well as for a heterologous epitope, such as a heterologous polypeptide or solid support material. See, e.g., PCT publications WO 93/17715; WO 92/08802; WO 91/00360; WO 92/05793; Tutt, et al., J. Immunol. 147:60-69 (1991); U.S. Pat. Nos. 4,474,893; 4,714,681; 4,925,648; 5,573,920; 5,601,819; Kostelny et al., J. Immunol. 148:1547-1553 (1992).

[0158] Antibodies that bind a Therapeutic protein (or fragment or variant thereof) may be bispecific or bifunctional which means that the antibody is an artificial hybrid antibody having two different heavy/light chain pairs and two different binding sites. Bispecific antibodies can be produced by a variety of methods including fusion of hybridomas or linking of Fab′ fragments. See, e.g., Songsivilai & Lachmann Clin. Exp. Immunol. 79: 315-321 (1990), Kostelny et al. J. Immunol. 148:1547 1553 (1992). In addition, bispecific antibodies may be formed as “diabodies” (Holliger et al. “‘Diabodies’: small bivalent and bispecific antibody fragments” PNAS USA 90:6444-6448 (1993)) or “Janusins” (Traunecker et al. “Bispecific single chain molecules (Janusins) target cytotoxic lymphocytes on HIV infected cells” EMBO J 10:3655-3659 (1991) and Traunecker et al. “Janusin: new molecular design for bispecific reagents” Int J Cancer Suppl 7:51-52 (1992)).

[0159] The present invention also provides albumin fusion proteins that comprise, fragments or variants (including derivatives) of an antibody described herein or known elsewhere in the art. Standard techniques known to those of skill in the art can be used to introduce mutations in the nucleotide sequence encoding a molecule of the invention, including, for example, site-directed mutagenesis and PCR-mediated mutagenesis which result in amino acid substitutions. Preferably, the variants (including derivatives) encode less than 50 amino acid substitutions, less than 40 amino acid subsitutions, less than 30 amino acid substitutions, less than 25 amino acid substitutions, less than 20 amino acid substitutions, less than 15 amino acid substitutions, less than 10 amino acid substitutions, less than 5 amino acid substitutions, less than 4 amino acid substitutions, less than 3 amino acid substitutions, or less than 2 amino acid substitutions relative to the reference VH domain, VHCDR1, VHCDR2, VHCDR3, VL domain, VLCDR1, VLCDR2, or VLCDR3. In specific embodiments, the variants encode substitutions of VHCDR3. In a preferred embodiment, the variants have conservative amino acid substitutions at one or more predicted non-essential amino acid residues.

[0160] Antibodies that bind to a Therapeutic protein and that may correspond to a Therapeutic protein portion of an albumin fusion protein of the invention may be described or specified in terms of the epitope(s) or portion(s) of a Therapeutic protein which they recognize or specifically bind. Antibodies which specifically bind a Therapeutic protein or a specific epitope of a Therapeutic protein may also be excluded. Therefore, the present invention encompasses antibodies that specifically bind Therapeutic proteins, and allows for the exclusion of the same. In preferred embodiments, albumin fusion proteins comprising at least a fragment or variant of an antibody that binds a Therapeutic protein, binds the same epitopes as the.

[0161] Antibodies that bind to a Therapeutic protein and that may correspond to a Therapeutic protein portion of an albumin fusion protein of the invention may also be described or specified in terms of their cross-reactivity. Antibodies that do not bind any other analog, ortholog, or homolog of a Therapeutic protein are included. Antibodies that bind polypeptides with at least 95%, at least 90%, at least 85%, at least 80%, at least 75%, at least 70%, at least 65%, at least 60%, at least 55%, and at least 50% identity (as calculated using methods known in the art and described herein) to a Therapeutic protein are also included in the present invention. In specific embodiments, antibodies that bind to a Therapeutic protein and that may correspond to a Therapeutic protein portion of an albumin fusion protein of the invention cross-react with murine, rat and/or rabbit homologs of human proteins and the corresponding epitopes thereof. Antibodies that do not bind polypeptides with less than 95%, less than 90%, less than 85%, less than 80%, less than 75%, less than 70%, less than 65%, less than 60%, less than 55%, and less than 50% identity (as calculated using methods known in the art and described herein) to a Therapeutic protein are also included in the present invention. In a specific embodiment, the above-described cross-reactivity is with respect to any single specific antigenic or immunogenic polypeptide, or combination(s) of 2, 3, 4, 5, or more of the specific antigenic and/or immunogenic polypeptides disclosed herein. In preferred embodiments, albumin fusion proteins comprising at least a fragment or variant of an antibody that binds a Therapeutic protein, has similar or substantially identical cross reactivity characteristics compared to the.

[0162] Further included in the present invention are antibodies which bind polypeptides encoded by polynucleotides which hybridize to a polynucleotide encoding a Therapeutic protein under stringent hybridization conditions (as described herein). Antibodies that bind to a Therapeutic protein and that may correspond to a Therapeutic protein portion of an albumin fusion protein of the invention may also be described or specified in terms of their binding affinity to a polypeptide of the invention. Preferred binding affinities include those with a dissociation constant or Kd less than 5×10⁻² M, 10⁻² M, 5×10⁻³ M, 10⁻³ M, 5×10⁻⁴ M, 10⁻⁴ M. More preferred binding affinities include those with a dissociation constant or Kd less than 5×10⁻⁵ M, 10⁻⁵ M, 5×10⁻⁶ M, 10⁻⁶M, 5×10⁻⁷ M, 10⁷ M, 5×10⁻⁸ M or 10⁻⁸ M. Even more preferred binding affinities include those with a dissociation constant or Kd less than 5×10⁻⁹ M, 10⁻⁹ M, 5×10⁻¹⁰ M, 10⁻¹⁰ M, 5×10⁻¹¹ M, 10⁻¹¹ M, 5×10⁻¹² M, ¹⁰⁻¹² M, 5×10⁻¹³ M, 10⁻¹³ M, 5×10⁻¹⁴ M, 10⁻¹⁴ M, 5×10⁻¹⁵ M, or 10⁻¹⁵ M. In preferred embodiments, albumin fusion proteins comprising at least a fragment or variant of an antibody that binds a Therapeutic protein, has an affinity for a given protein or epitope similar to that of the corresponding antibody (not fused to albumin) that binds a Therapeutic protein, taking into account the valency of the albumin fusion protein (comprising at least a fragment or variant of an antibody that binds a Therapeutic protein) and the valency of the corresponding antibody.

[0163] The invention also provides antibodies that competitively inhibit binding of an antibody to an epitope of a Therapeutic protein as determined by any method known in the art for determining competitive binding, for example, the immunoassays described herein. In preferred embodiments, the antibody competitively inhibits binding to the epitope by at least 95%, at least 90%, at least 85%, at least 80%, at least 75%, at least 70%, at least 60%, or at least 50%. In preferred embodiments, albumin fusion proteins comprising at least a fragment or variant of an antibody that binds a Therapeutic protein, competitively inhibits binding of an antibody to an epitope of a Therapeutic protein as well as the competitively inhibits binding of an antibody to an epitope of a Therapeutic protein. In other preferred embodiments, albumin fusion proteins comprising at least a fragment or variant of an antibody that binds a Therapeutic protein, competitively inhibits binding of the to an epitope of a Therapeutic protein by at least 95%, at least 90%, at least 85%, at least 80%, at least 75%, at least 70%, at least 60%, or at least 50%.

[0164] Antibodies that bind to a Therapeutic protein and that may correspond to a Therapeutic protein portion of an albumin fusion protein of the invention may act as agonists or antagonists of the Therapeutic protein. For example, the present invention includes antibodies which disrupt the receptor/ligand interactions with the polypeptides of the invention either partially or fully. The invention features both receptor-specific antibodies and ligand-specific antibodies. The invention also features receptor-specific antibodies which do not prevent ligand binding but prevent receptor activation. Receptor activation (i.e., signaling) may be determined by techniques described herein or otherwise known in the art. For example, receptor activation can be determined by detecting the phosphorylation (e.g., tyrosine or serine/threonine) of the receptor or its substrate by immunoprecipitation followed by western blot analysis (for example, as described supra). In specific embodiments, antibodies are provided that inhibit ligand activity or receptor activity by at least 95%, at least 90%, at least 85%, at least 80%, at least 75%, at least 70%, at least 60%, or at least 50% of the activity in absence of the antibody. In preferred embodiments, albumin fusion proteins comprising at least a fragment or variant of an antibody that binds a Therapeutic protein, has similar or substantially similar characteristics with regard to preventing ligand binding and/or preventing receptor activation compared to the.

[0165] The invention also features receptor-specific antibodies which both prevent ligand binding and receptor activation as well as antibodies that recognize the receptor-ligand complex, and, preferably, do not specifically recognize the unbound receptor or the unbound ligand. Likewise, included in the invention are neutralizing antibodies which bind the ligand and prevent binding of the ligand to the receptor, as well as antibodies which bind the ligand, thereby preventing receptor activation, but do not prevent the ligand from binding the receptor. Further included in the invention are antibodies which activate the receptor. These antibodies may act as receptor agonists, i.e., potentiate or activate either all or a subset of the biological activities of the ligand-mediated receptor activation, for example, by inducing dimerization of the receptor. The antibodies may be specified as agonists, antagonists or inverse agonists for biological activities comprising the specific biological activities of the Therapeutic protreins (e.g. as disclosed in Table 1). The above antibody agonists can be made using methods known in the art. See, e.g., PCT publication WO 96/40281; U.S. Pat. No. 5,811,097; Deng et al., Blood 92(6):1981-1988 (1998); Chen et al., Cancer Res. 58(16):3668-3678 (1998); Harrop et al., J. Immunol. 161(4):1786-1794 (1998); Zhu et al., Cancer Res. 58(15):3209-3214 (1998); Yoon et al., J. Immunol. 160(7):3170-3179 (1998); Prat et al., J. Cell. Sci. 111(Pt2):237-247 (1998); Pitard et al., J. Immunol. Methods 205(2):177-190 (1997); Liautard et al., Cytokine 9(4):233-241 (1997); Carlson et al., J. Biol. Chem. 272(17):11295-11301 (1997); Taryrnan et al., Neuron 14(4):755-762 (1995); Muller et al., Structure 6(9):1153-1167 (1998); Bartunek et al., Cytokine 8(1):14-20 (1996) (which are all incorporated by reference herein in their entireties). In preferred embodiments, albumin fusion proteins comprising at least a fragment or variant of an antibody that binds a Therapeutic protein, have similar or substantially identical agonist or antagonist properties as the.

[0166] Antibodies that bind to a Therapeutic protein and that may correspond to a Therapeutic protein portion of an albumin fusion protein of the invention may be used, for example, to purify, detect, and target Therapeutic proteins, including both in in vitro and in vivo diagnostic and therapeutic methods. For example, the antibodies have utility in immunoassays for qualitatively and quantitatively measuring levels of the Therapeutic protein in biological samples. See, e.g., Harlow et al., Antibodies: A Laboratory Manual, (Cold Spring Harbor Laboratory Press, 2nd ed. 1988); incorporated by reference herein in its entirety. Likewise, albumin fusion proteins comprising at least a fragment or variant of an antibody that binds a Therapeutic protein, may be used, for example, to purify, detect, and target Therapeutic proteins, including both in in vitro and in vivo diagnostic and therapeutic methods.

[0167] Antibodies that bind to a Therapeutic protein and that may correspond to a Therapeutic protein portion of an albumin fusion protein include derivatives that are modified, i.e, by the covalent attachment of any type of molecule to the antibody. For example, but not by way of limitation, the antibody derivatives include antibodies that have been modified, e.g., by glycosylation, acetylation, pegylation, phosphylation, amidation, derivatization by known protecting/blocking groups, proteolytic cleavage, linkage to a cellular ligand or other protein, etc. Any of numerous chemical modifications may be carried out by known techniques, including, but not limited to specific chemical cleavage, acetylation, formylation, metabolic synthesis of tunicamycin, etc. Additionally, the derivative may contain one or more non-classical amino acids. Albumin fusion proteins of the invention may also be modified as described above.

[0168] Methods of Producing Antibodies that Bind Therapeutic Proteins

[0169] The antibodies that bind to a Therapeutic protein and that may correspond to a Therapeutic protein portion of an albumin fusion protein of the invention may be generated by any suitable method known in the art. Polyclonal antibodies to an antigen-of-interest can be produced by various procedures well known in the art. For example, a Therapeutic protein may be administered to various host animals including, but not limited to, rabbits, mice, rats, etc. to induce the production of sera containing polyclonal antibodies specific for the antigen. Various adjuvants may be used to increase the immunological response, depending on the host species, and include but are not limited to, Freund's (complete and incomplete), mineral gels such as aluminum hydroxide, surface active substances such as lysolecithin, pluronic polyols, polyanions, peptides, oil emulsions, keyhole limpet hemocyanins, dinitrophenol, and potentially useful human adjuvants such as BCG (bacille Calmette-Guerin) and corynebacterium parvum. Such adjuvants are also well known in the art.

[0170] Monoclonal antibodies can be prepared using a wide variety of techniques known in the art including the use of hybridoma, recombinant, and phage display technologies, or a combination thereof. For example, monoclonal antibodies can be produced using hybridoma techniques including those known in the art and taught, for example, in Harlow et al., Antibodies: A Laboratory Manual, (Cold Spring Harbor Laboratory Press, 2nd ed. 1988); Hammerling, et al., in: Monoclonal Antibodies and T-Cell Hybridomas 563-681 (Elsevier, N.Y., 1981) (said references incorporated by reference in their entireties). The term “monoclonal antibody” as used herein is not limited to antibodies produced through hybridoma technology. The term “monoclonal antibody” refers to an antibody that is derived from a single clone, including any eukaryotic, prokaryotic, or phage clone, and not the method by which it is produced.

[0171] Methods for producing and screening for specific antibodies using hybridoma technology are routine and well known in the art. In a non-limiting example, mice can be immunized with a Therapeutic protein or fragment or variant thereof or a cell expressing such a Therapeutic protein or fragment or variant thereof. Once an immune response is detected, e.g., antibodies specific for the antigen are detected in the mouse serum, the mouse spleen is harvested and splenocytes isolated. The splenocytes are then fused by well known techniques to any suitable myeloma cells, for example cells from cell line SP20 available from the ATCC. Hybridomas are selected and cloned by limited dilution. The hybridoma clones are then assayed by methods known in the art for cells that secrete antibodies capable of binding a polypeptide of the invention. Ascites fluid, which generally contains high levels of antibodies, can be generated by immunizing mice with positive hybridoma clones.

[0172] Accordingly, the present invention provides methods of generating monoclonal antibodies as well as antibodies produced by the method comprising culturing a hybridoma cell secreting an antibody wherein, preferably, the hybridoma is generated by fusing splenocytes isolated from a mouse immunized with an antigen of the invention with myeloma cells and then screening the hybridomas resulting from the fusion for hybridoma clones that secrete an antibody able to bind a polypeptide of the invention.

[0173] Another well known method for producing both polyclonal and monoclonal human B cell lines is transformation using Epstein Barr Virus (EBV). Protocols for generating EBV-transformed B cell lines are commonly known in the art, such as, for example, the protocol outlined in Chapter 7.22 of Current Protocols in Immunology, Coligan et al., Eds., 1994, John Wiley & Sons, NY, which is hereby incorporated in its entirety by reference. The source of B cells for transformation is commonly human peripheral blood, but B cells for transformation may also be derived from other sources including, but not limited to, lymph nodes, tonsil, spleen, tumor tissue, and infected tissues. Tissues are generally made into single cell suspensions prior to EBV transformation. Additionally, steps may be taken to either physically remove or inactivate T cells (e.g., by treatment with cyclosporin A) in B cell-containing samples, because T cells from individuals seropositive for anti-EBV antibodies can suppress B cell immortalization by EBV.

[0174] In general, the sample containing human B cells is innoculated with EBV, and cultured for 3-4 weeks. A typical source of EBV is the culture supernatant of the B95-8 cell line (ATCC #VR-1492). Physical signs of EBV transformation can generally be seen towards the end of the 3-4 week culture period. By phase-contrast microscopy, transformed cells may appear large, clear, hairy and tend to aggregate in tight clusters of cells. Initially, EBV lines are generally polyclonal. However, over prolonged periods of cell cultures, EBV lines may become monoclonal or polyclonal as a result of the selective outgrowth of particular B cell clones. Alternatively, polyclonal EBV transformed lines may be subcloned (e.g., by limiting dilution culture) or fused with a suitable fusion partner and plated at limiting dilution to obtain monoclonal B cell lines. Suitable fusion partners for EBV transformed cell lines include mouse myeloma cell lines (e.g., SP2/0, X63-Ag8.653), heteromyeloma cell lines (human×mouse; e.g, SPAM-8, SBC-H₂O, and CB-F7), and human cell lines (e.g., GM 1500, SKO-007, RPMI 8226, and KR-4). Thus, the present invention also provides a method of generating polyclonal or monoclonal human antibodies against polypeptides of the invention or fragments thereof, comprising EBV-transformation of human B cells.

[0175] Antibody fragments which recognize specific epitopes may be generated by known techniques. For example, Fab and F(ab′)₂ fragments of the invention may be produced by proteolytic cleavage of immunoglobulin molecules, using enzymes such as papain (to produce Fab fragments) or pepsin (to produce F(ab′)₂ fragments). F(ab′)2 fragments contain the variable region, the light chain constant region and the CH1 domain of the heavy chain.

[0176] For example, antibodies that bind to a Therapeutic protein can also be generated using various phage display methods known in the art. In phage display methods, functional antibody domains are displayed on the surface of phage particles which carry the polynucleotide sequences encoding them. In a particular embodiment, such phage can be utilized to display antigen binding domains expressed from a repertoire or combinatorial antibody library (e.g., human or murine). Phage expressing an antigen binding domain that binds the antigen of interest can be selected or identified with antigen, e.g., using labeled antigen or antigen bound or captured to a solid surface or bead. Phage used in these methods are typically filamentous phage including fd and M13 binding domains expressed from phage with Fab, Fv or disulfide stabilized Fv antibody domains recombinantly fused to either the phage gene III or gene VIII protein. Examples of phage display methods that can be used to make antibodies that bind to a Therapeutic protein include those disclosed in Brinkman et al., J. Immunol. Methods 182:41-50 (1995); Ames et al., J. Immunol. Methods 184:177-186 (1995); Kettleborough et al., Eur. J. Immunol. 24:952-958 (1994); Persic et al., Gene 1879-18 (1997); Burton et al., Advances in Immunology 57:191-280 (1994); PCT application No. PCT/GB91/01134; PCT publications WO 90/02809; WO 91/10737; WO 92/01047; WO 92/18619; WO 93/11236; WO 95/15982; WO 95/20401; and U.S. Pat. Nos. 5,698,426; 5,223,409; 5,403,484; 5,580,717; 5,427,908; 5,750,753; 5,821,047; 5,571,698; 5,427,908; 5,516,637; 5,780,225; 5,658,727; 5,733,743 and 5,969,108; each of which is incorporated herein by reference in its entirety.

[0177] As described in the above references, after phage selection, the antibody coding regions from the phage can be isolated and used to generate whole antibodies, including human antibodies, or any other desired antigen binding fragment, and expressed in any desired host, including mammalian cells, insect cells, plant cells, yeast, and bacteria, e.g., as described in detail below. For example, techniques to recombinantly produce Fab, Fab′ and F(ab′)2 fragments can also be employed using methods known in the art such as those disclosed in PCT publication WO 92/22324; Mullinax et al., BioTechniques 12(6):864-869 (1992); and Sawai et al., AJRI 34:26-34 (1995); and Better et al., Science 240:1041-1043 (1988) (said references incorporated by reference in their entireties).

[0178] Examples of techniques which can be used to produce single-chain Fvs and antibodies include those described in U.S. Pat. Nos. 4,946,778 and 5,258,498; Huston et al., Methods in Enzymology 203:46-88 (1991); Shu et al., PNAS 90:7995-7999 (1993); and Skerra et al., Science 240:1038-1040 (1988). For some uses, including in vivo use of antibodies in humans and in vitro detection assays, it may be preferable to use chimeric, humanized, or human antibodies. A chimeric antibody is a molecule in which different portions of the antibody are derived from different animal species, such as antibodies having a variable region derived from a murine monoclonal antibody and a human immunoglobulin constant region. Methods for producing chimeric antibodies are known in the art. See e.g., Morrison, Science 229:1202 (1985); Oi et al., BioTechniques 4:214 (1986); Gillies et al., (1989) J. Immunol. Methods 125:191-202; U.S. Pat. Nos. 5,807,715; 4,816,567; and 4,816,397, which are incorporated herein by reference in their entirety. Humanized antibodies are antibody molecules from non-human species antibody that binds the desired antigen having one or more complementarity determining regions (CDRs) from the non-human species and a framework regions from a human immunoglobulin molecule. Often, framework residues in the human framework regions will be substituted with the corresponding residue from the CDR donor antibody to alter, preferably improve, antigen binding. These framework substitutions are identified by methods well known in the art, e.g., by modeling of the interactions of the CDR and framework residues to identify framework residues important for antigen binding and sequence comparison to identify unusual framework residues at particular positions. (See, e.g., Queen et al., U.S. Pat. No. 5,585,089; Riechmann et al., Nature 332:323 (1988), which are incorporated herein by reference in their entireties.) Antibodies can be humanized using a variety of techniques known in the art including, for example, CDR-grafting (EP 239,400; PCT publication WO 91/09967; U.S. Pat. Nos. 5,225,539; 5,530,101; and 5,585,089), veneering or resurfacing (EP 592,106; EP 519,596; Padlan, Molecular Immunology 28(4/5):489-498 (1991); Studnicka et al., Protein Engineering 7(6):805-814 (1994); Roguska. et al., PNAS 91:969-973 (1994)), and chain shuffling (U.S. Pat. No. 5,565,332).

[0179] Completely human antibodies are particularly desirable for therapeutic treatment of human patients. Human antibodies can be made by a variety of methods known in the art including phage display methods described above using antibody libraries derived from human immunoglobulin sequences. See also, U.S. Pat. Nos. 4,444,887 and 4,716,111; and PCT publications WO 98/46645, WO 98/50433, WO 98/24893, WO 98/16654, WO 96/34096, WO 96/33735, and WO 91/10741; each of which is incorporated herein by reference in its entirety.

[0180] Human antibodies can also be produced using transgenic mice which are incapable of expressing functional endogenous immunoglobulins, but which can express human immunoglobulin genes. For example, the human heavy and light chain immunoglobulin gene complexes may be introduced randomly or by homologous recombination into mouse embryonic stem cells. Alternatively, the human variable region, constant region, and diversity region may be introduced into mouse embryonic stem cells in addition to the human heavy and light chain genes. The mouse heavy and light chain immunoglobulin genes may be rendered non-functional separately or simultaneously with the introduction of human immunoglobulin loci by homologous recombination. In particular, homozygous deletion of the JH region prevents endogenous antibody production. The modified embryonic stem cells are expanded and microinjected into blastocysts to produce chimeric mice. The chimeric mice are then bred to produce homozygous offspring which express human antibodies. The transgenic mice are immunized in the normal fashion with a selected antigen, e.g., all or a portion of a polypeptide of the invention. Monoclonal antibodies directed against the antigen can be obtained from the immunized, transgenic mice using conventional hybridoma technology. The human immunoglobulin transgenes harbored by the transgenic mice rearrange during B cell differentiation, and subsequently undergo class switching and somatic mutation. Thus, using such a technique, it is possible to produce therapeutically useful IgG, IgA, IgM and IgE antibodies. For an overview of this technology for producing human antibodies, see Lonberg and Huszar, Int. Rev. Immunol. 13:65-93 (1995). For a detailed discussion of this technology for producing human antibodies and human monoclonal antibodies and protocols for producing such antibodies, see, e.g., PCT publications WO 98/24893; WO 92/01047; WO 96/34096; WO 96/33735; European Patent No. 0 598 877; U.S. Pat. Nos. 5,413,923; 5,625,126; 5,633,425; 5,569,825; 5,661,016; 5,545,806; 5,814,318; 5,885,793; 5,916,771; 5,939,598; 6,075,181; and 6,114,598, which are incorporated by reference herein in their entirety. In addition, companies such as Abgenix, Inc. (Freemont, Calif.) and Genpharm (San Jose, Calif.) can be engaged to provide human antibodies directed against a selected antigen using technology similar to that described above.

[0181] Completely human antibodies which recognize a selected epitope can be generated using a technique referred to as “guided selection.” In this approach a selected non-human monoclonal antibody, e.g., a mouse antibody, is used to guide the selection of a completely human antibody recognizing the same epitope. (Jespers et al., Bio/technology 12:899-903 (1988)).

[0182] Polynucleotides Encoding Antibodies

[0183] The invention further provides polynucleotides comprising a nucleotide sequence encoding an antibody and fragments thereof. The invention also encompasses polynucleotides that hybridize under stringent or alternatively, under lower stringency hybridization conditions, e.g., as defined supra, to polynucleotides that encode an antibody, preferably, that specifically binds to a Therapeutic protein, and more preferably, an antibody that binds to a polypeptide having the amino acid sequence of a “therapeutic protein X as discosed in the “Exemplay Identifier” column of Table 1.

[0184] The polynucleotides may be obtained, and the nucleotide sequence of the polynucleotides determined, by any method known in the art. For example, if the nucleotide sequence of the antibody is known, a polynucleotide encoding the antibody may be assembled from chemically synthesized oligonucleotides (e.g., as described in Kutmeier et al., BioTechniques 17:242 (1994)), which, briefly, involves the synthesis of overlapping oligonucleotides containing portions of the sequence encoding the antibody, annealing and ligating of those oligonucleotides, and then amplification of the ligated oligonucleotides by PCR.

[0185] Alternatively, a polynucleotide encoding an antibody may be generated from nucleic acid from a suitable source. If a clone containing a nucleic acid encoding a particular antibody is not available, but the sequence of the antibody molecule is known, a nucleic acid encoding the immunoglobulin may be chemically synthesized or obtained from a suitable source (e.g., an antibody cDNA library, or a cDNA library generated from, or nucleic acid, preferably poly A+ RNA, isolated from, any tissue or cells expressing the antibody, such as hybridoma cells selected to express an antibody) by PCR amplification using synthetic primers hybridizable to the 3′ and 5′ ends of the sequence or by cloning using an oligonucleotide probe specific for the particular gene sequence to identify, e.g., a cDNA clone from a cDNA library that encodes the antibody. Amplified nucleic acids generated by PCR may then be cloned into replicable cloning vectors using any method well known in the art (See Example 60).

[0186] Once the nucleotide sequence and corresponding amino acid sequence of the antibody is determined, the nucleotide sequence of the antibody may be manipulated using methods well known in the art for the manipulation of nucleotide sequences, e.g., recombinant DNA techniques, site directed mutagenesis, PCR, etc. (see, for example, the techniques described in Sambrook et al., 1990, Molecular Cloning, A Laboratory Manual, 2d Ed., Cold Spring Harbor Laboratory, Cold Spring Harbor, N.Y. and Ausubel et al., eds., 1998, Current Protocols in Molecular Biology, John Wiley & Sons, NY, which are both incorporated by reference herein in their entireties), to generate antibodies having a different amino acid sequence, for example to create amino acid substitutions, deletions, and/or insertions.

[0187] In a specific embodiment, the amino acid sequence of the heavy and/or light chain variable domains may be inspected to identify the sequences of the complementarity determining regions (CDRs) by methods that are well know in the art, e.g., by comparison to known amino acid sequences of other heavy and light chain variable regions to determine the regions of sequence hypervariability. Using routine recombinant DNA techniques, one or more of the CDRs may be inserted within framework regions, e.g., into human framework regions to humanize a non-human antibody, as described supra. The framework regions may be naturally occurring or consensus framework regions, and preferably human framework regions (see, e.g., Chothia et al., J. Mol. Biol. 278: 457-479 (1998) for a listing of human framework regions). Preferably, the polynucleotide generated by the combination of the framework regions and CDRs encodes an antibody that specifically binds a polypeptide of the invention. Preferably, as discussed supra, one or more amino acid substitutions may be made within the framework regions, and, preferably, the amino acid substitutions improve binding of the antibody to its antigen. Additionally, such methods may be used to make amino acid substitutions or deletions of one or more variable region cysteine residues participating in an intrachain disulfide bond to generate antibody molecules lacking one or more intrachain disulfide bonds. Other alterations to the polynucleotide are encompassed by the present invention and within the skill of the art.

[0188] In addition, techniques developed for the production of “chimeric antibodies” (Morrison et al., Proc. Natl. Acad. Sci. 81:851-855 (1984); Neuberger et al., Nature 312:604-608 (1984); Takeda et al., Nature 314:452-454 (1985)) by splicing genes from a mouse antibody molecule of appropriate antigen specificity together with genes from a human antibody molecule of appropriate biological activity can be used. As described supra, a chimeric antibody is a molecule in which different portions are derived from different animal species, such as those having a variable region derived from a murine mAb and a human immunoglobulin constant region, e.g., humanized antibodies.

[0189] Alternatively, techniques described for the production of single chain antibodies (U.S. Pat. No. 4,946,778; Bird, Science 242:423-42 (1988); Huston et al., Proc. Natl. Acad. Sci. USA 85:5879-5883 (1988); and Ward et al., Nature 334:544-54 (1989)) can be adapted to produce single chain antibodies. Single chain antibodies are formed by linking the heavy and light chain fragments of the Fv region via an amino acid bridge, resulting in a single chain polypeptide. Techniques for the assembly of functional Fv fragments in E. coli may also be used (Skerra et al., Science 242:1038-1041 (1988)).

[0190] Recombinant Expression of Antibodies

[0191] Recombinant expression of an antibody, or fragment, derivative or analog thereof, (e.g., a heavy or light chain of an antibody or a single chain antibody), requires construction of an expression vector containing a polynucleotide that encodes the antibody. Once a polynucleotide encoding an antibody molecule or a heavy or light chain of an antibody, or portion thereof (preferably containing the heavy or light chain variable domain), of the invention has been obtained, the vector for the production of the antibody molecule may be produced by recombinant DNA technology using techniques well known in the art. Thus, methods for preparing a protein by expressing a polynucleotide containing an antibody encoding nucleotide sequence are described herein. Methods which are well known to those skilled in the art can be used to construct expression vectors containing antibody coding sequences and appropriate transcriptional and translational control signals. These methods include, for example, in vitro recombinant DNA techniques, synthetic techniques, and in vivo genetic recombination. The invention, thus, provides replicable vectors comprising a nucleotide sequence encoding an antibody molecule of the invention, or a heavy or light chain thereof, or a heavy or light chain variable domain, operably linked to a promoter. Such vectors may include the nucleotide sequence encoding the constant region of the antibody molecule (see, e.g., PCT Publication WO 86/05807; PCT Publication WO 89/01036; and U.S. Pat. No. 5,122,464) and the variable domain of the antibody may be cloned into such a vector for expression of the entire heavy or light chain.

[0192] The expression vector is transferred to a host cell by conventional techniques and the transfected cells are then cultured by conventional techniques to produce an antibody. Thus, the invention includes host cells containing a polynucleotide encoding an antibody of the invention, or a heavy or light chain thereof, or a single chain antibody, operably linked to a heterologous promoter. In preferred embodiments for the expression of double-chained antibodies, vectors encoding both the heavy and light chains may be co-expressed in the host cell for expression of the entire immunoglobulin molecule, as detailed below.

[0193] A variety of host-expression vector systems may be utilized to express the antibody molecules of the invention. Such host-expression systems represent vehicles by which the coding sequences of interest may be produced and subsequently purified, but also represent cells which may, when transformed or transfected with the appropriate nucleotide coding sequences, express an antibody molecule of the invention in situ. These include but are not limited to microorganisms such as bacteria (e.g., E. coli, B. subtilis) transformed with recombinant bacteriophage DNA, plasmid DNA or cosmid DNA expression vectors containing antibody coding sequences; yeast (e.g., Saccharomyces, Pichia) transformed with recombinant yeast expression vectors containing antibody coding sequences; insect cell systems infected with recombinant virus expression vectors (e.g., baculovirus) containing antibody coding sequences; plant cell systems infected with recombinant virus expression vectors (e.g., cauliflower mosaic virus, CAMV; tobacco mosaic virus, TMV) or transformed with recombinant plasmid expression vectors (e.g., Ti plasmid) containing antibody coding sequences; or mammalian cell systems (e.g., COS, CHO, BHK, 293, 3T3 cells) harboring recombinant expression constructs containing promoters derived from the genome of mammalian cells (e.g., metallothionein promoter) or from mammalian viruses (e.g., the adenovirus late promoter; the vaccinia virus 7.5K promoter). Preferably, bacterial cells such as Escherichia coli, and more preferably, eukaryotic cells, especially for the expression of whole recombinant antibody molecule, are used for the expression of a recombinant antibody molecule. For example, mammalian cells such as Chinese hamster ovary cells (CHO), in conjunction with a vector such as the major intermediate early gene promoter element from human cytomegalovirus is an effective expression system for antibodies (Foecking et al., Gene 45:101 (1986); Cockett et al., Bio/Technology 8:2 (1990)).

[0194] In bacterial systems, a number of expression vectors may be advantageously selected depending upon the use intended for the antibody molecule being expressed. For example, when a large quantity of such a protein is to be produced, for the generation of pharmaceutical compositions of an antibody molecule, vectors which direct the expression of high levels of fusion protein products that are readily purified may be desirable. Such vectors include, but are not limited, to the E. coli expression vector pUR278 (Ruther et al., EMBO J. 2:1791 (1983)), in which the antibody coding sequence may be ligated individually into the vector in frame with the lac Z coding region so that a fusion protein is produced; pIN vectors (Inouye & Inouye, Nucleic Acids Res. 13:3101-3109 (1985); Van Heeke & Schuster, J. Biol. Chem. 24:5503-5509 (1989)); and the like. pGEX vectors may also be used to express foreign polypeptides as fusion proteins with glutathione S-transferase (GST). In general, such fusion proteins are soluble and can easily be purified from lysed cells by adsorption and binding to matrix glutathione-agarose beads followed by elution in the presence of free glutathione. The pGEX vectors are designed to include thrombin or factor Xa protease cleavage sites so that the cloned target gene product can be released from the GST moiety.

[0195] In an insect system, Autographa californica nuclear polyhedrosis virus (AcNPV) is used as a vector to express foreign genes. The virus grows in Spodoptera frugiperda cells. The antibody coding sequence may be cloned individually into non-essential regions (for example the polyhedrin gene) of the virus and placed under control of an AcNPV promoter (for example the polyhedrin promoter).

[0196] In mammalian host cells, a number of viral-based expression systems may be utilized. In cases where an adenovirus is used as an expression vector, the antibody coding sequence of interest may be ligated to an adenovirus transcription/translation control complex, e.g., the late promoter and tripartite leader sequence. This chimeric gene may then be inserted in the adenovirus genome by in vitro or in vivo recombination. Insertion in a non-essential region of the viral genome (e.g., region E1 or E3) will result in a recombinant virus that is viable and capable of expressing the antibody molecule in infected hosts. (e.g., see Logan & Shenk, Proc. Natl. Acad. Sci. USA 81:355-359 (1984)). Specific initiation signals may also be required for efficient translation of inserted antibody coding sequences. These signals include the ATG initiation codon and adjacent sequences. Furthermore, the initiation codon must be in phase with the reading frame of the desired coding sequence to ensure translation of the entire insert. These exogenous translational control signals and initiation codons can be of a variety of origins, both natural and synthetic. The efficiency of expression may be enhanced by the inclusion of appropriate transcription enhancer elements, transcription terminators, etc. (see Bittner et al., Methods in Enzymol. 153:51-544 (1987)).

[0197] In addition, a host cell strain may be chosen which modulates the expression of the inserted sequences, or modifies and processes the gene product in the specific fashion desired. Such modifications (e.g., glycosylation) and processing (e.g., cleavage) of protein products may be important for the function of the protein. Different host cells have characteristic and specific mechanisms for the post-translational processing and modification of proteins and gene products. Appropriate cell lines or host systems can be chosen to ensure the correct modification and processing of the foreign protein expressed. To this end, eukaryotic host cells which possess the cellular machinery for proper processing of the primary transcript, glycosylation, and phosphorylation of the gene product may be used. Such mammalian host cells include but are not limited to CHO, VERY, BHK, Hela, COS, MDCK, 293, 3T3, WI38, and in particular, breast cancer cell lines such as, for example, BT483, Hs578T, HTB2, BT20 and T47D, and normal mammary gland cell line such as, for example, CRL7030 and Hs578Bst.

[0198] For long-term, high-yield production of recombinant proteins, stable expression is preferred. For example, cell lines which stably express the antibody molecule may be engineered. Rather than using expression vectors which contain viral origins of replication, host cells can be transformed with DNA controlled by appropriate expression control elements (e.g., promoter, enhancer, sequences, transcription terminators, polyadenylation sites, etc.), and a selectable marker. Following the introduction of the foreign DNA, engineered cells may be allowed to grow for 1-2 days in an enriched media, and then are switched to a selective media. The selectable marker in the recombinant plasmid confers resistance to the selection and allows cells to stably integrate the plasmid into their chromosomes and grow to form foci which in turn can be cloned and expanded into cell lines. This method may advantageously be used to engineer cell lines which express the antibody molecule. Such engineered cell lines may be particularly useful in screening and evaluation of compounds that interact directly or indirectly with the antibody molecule.

[0199] A number of selection systems may be used, including but not limited to the herpes simplex virus thymidine kinase (Wigler et al., Cell 11:223 (1977)), hypoxanthine-guanine phosphoribosyltransferase (Szybalska & Szybalski, Proc. Natl. Acad. Sci. USA 48:202 (1992)), and adenine phosphoribosyltransferase (Lowy et al., Cell 22:817 (1980)) genes can be employed in tk-, hgprt- or aprt-cells, respectively. Also, antimetabolite resistance can be used as the basis of selection for the following genes: dhfr, which confers resistance to methotrexate (Wigler et al., Natl. Acad. Sci. USA 77:357 (1980); O'Hare et al., Proc. Natl. Acad. Sci. USA 78:1527 (1981)); gpt, which confers resistance to mycophenolic acid (Mulligan & Berg, Proc. Natl. Acad. Sci. USA 78:2072 (1981)); neo, which confers resistance to the aminoglycoside G-418 Clinical Pharmacy 12:488-505; Wu and Wu, Biotherapy 3:87-95 (1991); Tolstoshev, Ann. Rev. Pharmacol. Toxicol. 32:573-596 (1993); Mulligan, Science 260:926-932 (1993); and Morgan and Anderson, Ann. Rev. Biochem. 62:191-217 (1993); May, 1993, TIB TECH 11(5):155-215 (1993)); and hygro, which confers resistance to hygromycin (Santerre et al., Gene 30:147 (1984)). Methods commonly known in the art of recombinant DNA technology may be routinely applied to select the desired recombinant clone, and such methods are described, for example, in Ausubel et al. (eds.), Current Protocols in Molecular Biology, John Wiley & Sons, NY (1993); Kriegler, Gene Transfer and Expression, A Laboratory Manual, Stockton Press, NY (1990); and in Chapters 12 and 13, Dracopoli et al. (eds), Current Protocols in Human Genetics, John Wiley & Sons, NY (1994); Colberre-Garapin et al., J. Mol. Biol. 150:1 (1981), which are incorporated by reference herein in their entireties.

[0200] The expression levels of an antibody molecule can be increased by vector amplification (for a review, see Bebbington and Hentschel, The use of vectors based on gene amplification for the expression of cloned genes in mammalian cells in DNA cloning, Vol.3. (Academic Press, New York, 1987)). When a marker in the vector system expressing antibody is amplifiable, increase in the level of inhibitor present in culture of host cell will increase the number of copies of the marker gene. Since the amplified region is associated with the antibody gene, production of the antibody will also increase (Crouse et al., Mol. Cell. Biol. 3:257 (1983)).

[0201] Vectors which use glutamine synthase (GS) or DHFR as the selectable markers can be amplified in the presence of the drugs methionine sulphoximine or methotrexate, respectively. An advantage of glutamine synthase based vectors are the availabilty of cell lines (e.g., the murine myeloma cell line, NS0) which are glutamine synthase negative. Glutamine synthase expression systems can also function in glutamine synthase expressing cells (e.g. Chinese Hamster Ovary (CHO) cells) by providing additional inhibitor to prevent the functioning of the endogenous gene. A glutamine synthase expression system and components thereof are detailed in PCT publications: WO87/04462; WO86/05807; WO89/01036; WO89/10404; and WO91/06657 which are incorporated in their entireties by reference herein. Additionally, glutamine synthase expression vectors that may be used according to the present invention are commercially available from suppliers, including, for example Lonza Biologics, Inc. (Portsmouth, N.H.). Expression and production of monoclonal antibodies using a GS expression system in murine myeloma cells is described in Bebbington et al, Bio/technology 10:169(1992) and in Biblia and Robinson Biotechnol. Prog. 11:1 (1995) which are incorporated in their entirities by reference herein.

[0202] The host cell may be co-transfected with two expression vectors of the invention, the first vector encoding a heavy chain derived polypeptide and the second vector encoding a light chain derived polypeptide. The two vectors may contain identical selectable markers which enable equal expression of heavy and light chain polypeptides. Alternatively, a single vector may be used which encodes, and is capable of expressing, both heavy and light chain polypeptides. In such situations, the light chain should be placed before the heavy chain to avoid an excess of toxic free heavy chain (Proudfoot, Nature 322:52 (1986); Kohler, Proc. Natl. Acad. Sci. USA 77:2197 (1980)). The coding sequences for the heavy and light chains may comprise cDNA or genomic DNA.

[0203] Once an antibody molecule of the invention has been produced by an animal, chemically synthesized, or recombinantly expressed, it may be purified by any method known in the art for purification of an immunoglobulin molecule, for example, by chromatography (e.g., ion exchange, affinity, particularly by affinity for the specific antigen after Protein A, and sizing column chromatography), centrifugation, differential solubility, or by any other standard technique for the purification of proteins. In addition, the antibodies that bind to a Therapeutic protein and that may correspond to a Therapeutic protein portion of an albumin fusion protein of the invention or fragments thereof can be fused to heterologous polypeptide sequences described herein or otherwise known in the art, to facilitate purification.

[0204] Modifications of Antibodies

[0205] Antibodies that bind a Therapeutic protein or fragments or variants can be fused to marker sequences, such as a peptide to facilitate purification. In preferred embodiments, the marker amino acid sequence is a hexa-histidine peptide, such as the tag provided in a pQE vector (QIAGEN, Inc., 9259 Eton Avenue, Chatsworth, Calif., 91311), among others, many of which are commercially available. As described in Gentz et al., Proc. Natl. Acad. Sci. USA 86:821-824 (1989), for instance, hexa-histidine provides for convenient purification of the fusion protein. Other peptide tags useful for purification include, but are not limited to, the “HA” tag, which corresponds to an epitope derived from the influenza hemagglutinin protein (Wilson et al., Cell 37:767 (1984)) and the “flag” tag.

[0206] The present invention further encompasses antibodies or fragments thereof conjugated to a diagnostic or therapeutic agent. The antibodies can be used diagnostically to, for example, monitor the development or progression of a tumor as part of a clinical testing procedure to, e.g., determine the efficacy of a given treatment regimen. Detection can be facilitated by coupling the antibody to a detectable substance. Examples of detectable substances include various enzymes, prosthetic groups, fluorescent materials, luminescent materials, bioluminescent materials, radioactive materials, positron emitting metals using various positron emission tomographies, and nonradioactive paramagnetic metal ions. The detectable substance may be coupled or conjugated either directly to the antibody (or fragment thereof) or indirectly, through an intermediate (such as, for example, a linker known in the art) using techniques known in the art. See, for example, U.S. Pat. No. 4,741,900 for metal ions which can be conjugated to antibodies for use as diagnostics according to the present invention. Examples of suitable enzymes include horseradish peroxidase, alkaline phosphatase, beta-galactosidase, or acetylcholinesterase; examples of suitable prosthetic group complexes include streptavidin/biotin and avidin/biotin; examples of suitable fluorescent materials include umbelliferone, fluorescein, fluorescein isothiocyanate, rhodamine, dichlorotriazinylamine fluorescein, dansyl chloride or phycoerythrin; an example of a luminescent material includes luminol; examples of bioluminescent materials include luciferase, luciferin, and aequorin; and examples of suitable radioactive material include 125I, 131I, 111In or 99Tc. Other examples of detectable substances have been described elsewwhere herein.

[0207] Further, an antibody of the invention may be conjugated to a therapeutic moiety such as a cytotoxin, e.g., a cytostatic or cytocidal agent, a therapeutic agent or a radioactive metal ion, e.g., alpha-emitters such as, for example, 213Bi. A cytotoxin or cytotoxic agent includes any agent that is detrimental to cells. Examples include paclitaxol, cytochalasin B, gramicidin D, ethidium bromide, emetine, mitomycin, etoposide, tenoposide, vincristine, vinblastine, colchicin, doxorubicin, daunorubicin, dihydroxy anthracin dione, mitoxantrone, mithramycin, actinomycin D, 1-dehydrotestosterone, glucocorticoids, procaine, tetracaine, lidocaine, propranolol, and puromycin and analogs or homologs thereof. Therapeutic agents include, but are not limited to, antimetabolites (e.g., methotrexate, 6-mercaptopurine, 6-thioguanine, cytarabine, 5-fluorouracil decarbazine), alkylating agents (e.g., mechlorethamine, thioepa chlorambucil, melphalan, carmustine (BSNU) and lomustine (CCNU), cyclothosphamide, busulfan, dibromomannitol, streptozotocin, mitomycin C, and cis-dichlorodiamine platinum (II) (DDP) cisplatin), anthracyclines (e.g., daunorubicin (formerly daunomycin) and doxorubicin), antibiotics (e.g., dactinomycin (formerly actinomycin), bleomycin, mithramycin, and anthramycin (AMC)), and anti-mitotic agents (e.g., vincristine and vinblastine).

[0208] The conjugates of the invention can be used for modifying a given biological response, the therapeutic agent or drug moiety is not to be construed as limited to classical chemical therapeutic agents. For example, the drug moiety may be a protein or polypeptide possessing a desired biological activity. Such proteins may include, for example, a toxin such as abrin, ricin A, pseudomonas exotoxin, or diphtheria toxin; a protein such as tumor necrosis factor, alpha-interferon, β-interferon, nerve growth factor, platelet derived growth factor, tissue plasminogen activator, an apoptotic agent, e.g., TNF-alpha, TNF-beta, AIM I (See, International Publication No. WO 97/33899), AIM II (See, International Publication No. WO 97/34911), Fas Ligand (Takahashi et al., Int. Immunol., 6:1567-1574 (1994)), VEGI (See, International Publication No. WO 99/23105), a thrombotic agent or an anti-angiogenic agent, e.g., angiostatin or endostatin; or, biological response modifiers such as, for example, lymphokines, interleukin-1 (“IL-”), interleukin-2 (“IL-2”), interleukin-6 (“IL-6”), granulocyte macrophage colony stimulating factor (“GM-CSF”), granulocyte colony stimulating factor (“G-CSF”), or other growth factors.

[0209] Antibodies may also be attached to solid supports, which are particularly useful for immunoassays or purification of the target antigen. Such solid supports include, but are not limited to, glass, cellulose, polyacrylamide, nylon, polystyrene, polyvinyl chloride or polypropylene.

[0210] Techniques for conjugating such therapeutic moiety to antibodies are well known. See, for example, Arnon et al., “Monoclonal Antibodies For Immunotargeting Of Drugs In Cancer Therapy”, in Monoclonal Antibodies And Cancer Therapy, Reisfeld et al. (eds.), pp. 243-56 (Alan R. Liss, Inc. 1985); Hellstrom et al., “Antibodies For Drug Delivery”, in Controlled Drug Delivery (2nd Ed.), Robinson et al. (eds.), pp. 623-53 (Marcel Dekker, Inc. 1987); Thorpe, “Antibody Carriers Of Cytotoxic Agents In Cancer Therapy: A Review”, in Monoclonal Antibodies '84: Biological And Clinical Applications, Pinchera et al. (eds.), pp. 475-506 (1985); “Analysis, Results, And Future Prospective Of The Therapeutic Use Of Radiolabeled Antibody In Cancer Therapy”, in Monoclonal Antibodies For Cancer Detection And Therapy, Baldwin et al. (eds.), pp. 303-16 (Academic Press 1985), and Thorpe et al., “The Preparation And Cytotoxic Properties Of Antibody-Toxin Conjugates”, Immunol. Rev. 62:119-58 (1982).

[0211] Alternatively, an antibody can be conjugated to a second antibody to form an antibody heteroconjugate as described by Segal in U.S. Pat. No. 4,676,980, which is incorporated herein by reference in its entirety.

[0212] An antibody, with or without a therapeutic moiety conjugated to it, administered alone or in combination with cytotoxic factor(s) and/or cytokine(s) can be used as a therapeutic.

[0213] Antibody-Albumin Fusion

[0214] Antibodies that bind to a Therapeutic protein and that may correspond to a Therapeutic protein portion of an albumin fusion protein of the invention include, but are not limited to, antibodies that bind a Therapeutic protein disclosed in the “Therapeutic Protein X” column of Table 1, or a fragment or variant thereof.

[0215] In specific embodiments, the fragment or variant of an antibody that immunospecifcally binds a Therapeutic protein and that corresponds to a Therapeutic protein portion of an albumin fusion protein comprises, or alternatively consists of, the VH domain. In other embodiments, the fragment or variant of an antibody that immunospecifcally binds a Therapeutic protein and that corresponds to a Therapeutic protein portion of an albumin fusion protein comprises, or alternatively consists of, one, two or three VH CDRs. In other embodiments, the fragment or variant of an antibody that immunospecifcally binds a Therapeutic protein and that corresponds to a Therapeutic protein portion of an albumin fusion protein comprises, or alternatively consists of the VH CDR1. In other embodiments, the fragment or variant of an antibody that immunospecifcally binds a Therapeutic protein and that corresponds to a Therapeutic protein portion of an albumin fusion protein comprises, or alternatively consists of, the VH CDR2. In other embodiments, the fragment or variant of an antibody that immunospecifcally binds a Therapeutic protein and that corresponds to a Therapeutic protein portion of an albumin fusion protein comprises, or alternatively consists of, the VH CDR3.

[0216] In specific embodiments, the fragment or variant of an antibody that immunospecifcally binds a Therapeutic protein and that corresponds to a Therapeutic protein portion of an albumin fusion protein comprises, or alternatively consists of, the VL domain. In other embodiments, the fragment or variant of an antibody that immunospecifcally binds a Therapeutic protein and that corresponds to a Therapeutic protein portion of an albumin fusion protein comprises, or alternatively consists of, one, two or three VL CDRs. In other embodiments, the fragment or variant of an antibody that immunospecifcally binds a Therapeutic protein and that corresponds to a Therapeutic protein portion of an albumin fusion protein comprises, or alternatively consists of, the VL CDR1. In other embodiments, the fragment or variant of an antibody that immunospecifcally binds a Therapeutic protein and that corresponds to a Therapeutic protein portion of an albumin fusion protein comprises, or alternatively consists of, the VL CDR2. In other embodiments, the fragment or variant of an antibody that immunospecifcally binds a Therapeutic protein and that corresponds to a Therapeutic protein portion of an albumin fusion protein comprises, or alternatively consists of, the VL CDR3.

[0217] In other embodiments, the fragment or variant of an antibody that immunospecifcally binds a Therapeutic protein and that corresponds to a Therapeutic protein portion of an albumin fusion protein comprises, or alternatively consists of, one, two, three, four, five, or six VH and/or VL CDRs.

[0218] In preferred embodiments, the fragment or variant of an antibody that immunospecifcally binds a Therapeutic protein and that corresponds to a Therapeutic protein portion of an albumin fusion protein comprises, or alternatively consists of, an scFv comprising the VH domain of the Therapeutic antibody, linked to the VL domain of the therapeutic antibody by a peptide linker such as (Gly₄Ser)₃ (SEQ ID NO:36).

[0219] Immunophenotyping

[0220] The antibodies of the invention or albumin fusion proteins of the invention comprising at least a fragment or variant of an antibody that binds a Therapeutic protein (or fragment or variant thereof) may be utilized for immunophenotyping of cell lines and biological samples. Therapeutic proteins of the present invention may be useful as cell-specific markers, or more specifically as cellular markers that are differentially expressed at various stages of differentiation and/or maturation of particular cell types. Monoclonal antibodies (or albumin fusion proteins comprsing at least a fragment or variant of an antibody that binds a Therapeutic protein) directed against a specific epitope, or combination of epitopes, will allow for the screening of cellular populations expressing the marker. Various techniques can be utilized using monoclonal antibodies (or albumin fusion proteins comprising at least a fragment or variant of an antibody that binds a Therapeutic protein) to screen for cellular populations expressing the marker(s), and include magnetic separation using antibody-coated magnetic beads, “panning” with antibody attached to a solid matrix (i.e., plate), and flow cytometry (See, e.g., U.S. Pat. No. 5,985,660; and Morrison et al., Cell, 96:737-49 (1999)).

[0221] These techniques allow for the screening of particular populations of cells, such as might be found with hematological malignancies (i.e. minimal residual disease (MRD) in acute leukemic patients) and “non-self” cells in transplantations to prevent Graft-versus-Host Disease (GVHD). Alternatively, these techniques allow for the screening of hematopoietic stem and progenitor cells capable of undergoing proliferation and/or differentiation, as might be found in human umbilical cord blood.

[0222] Characterizing Antibodies that Bind a Therapeutic Protein and Albumin Fusion Proteins Comprising a Fragment or Variant of an Antibody that Binds a Therapeutic Protein

[0223] The antibodies of the invention or albumin fusion proteins of the invention comprising at least a fragment or variant of an antibody that binds a Therapeutic protein (or fragment or variant thereof) may be characterized in a variety of ways. In particular, Albumin fusion proteins of the invention comprising at least a fragment or variant of an antibody that binds a Therapeutic protein may be assayed for the ability to specifically bind to the same antigens specifically bound by the antibody that binds a Therapeutic protein corresponding to the antibody that binds a Therapeutic protein portion of the albumin fusion protein using techniques described herein or routinely modifying techniques known in the art.

[0224] Assays for the ability of the antibodies of the invention or albumin fusion proteins of the invention comprising at least a fragment or variant of an antibody that binds a Therapeutic protein (or fragment or variant thereof) to (specifically) bind a specific protein or epitope may be performed in solution (e.g., Houghten, Bio/Techniques 13:412-421(1992)), on beads (e.g., Lam, Nature 354:82-84 (1991)), on chips (e.g., Fodor, Nature 364:555-556 (1993)), on bacteria (e.g., U.S. Pat. No. 5,223,409), on spores (e.g., Patent Nos. 5,571,698; 5,403,484; and 5,223,409), on plasmids (e.g., Cull et al., Proc. Natl. Acad. Sci. USA 89:1865-1869 (1992)) or on phage (e.g., Scott and Smith, Science 249:386-390 (1990); Devlin, Science 249:404-406 (1990); Cwirla et al., Proc. Natl. Acad. Sci. USA 87:6378-6382 (1990); and Felici, J. Mol. Biol. 222:301-310 (1991)) (each of these references is incorporated herein in its entirety by reference). The antibodies of the invention or albumin fusion proteins of the invention comprising at least a fragment or variant of an antibody that binds a Therapeutic protein (or fragment or variant thereof) may also be assayed for their specificity and affinity for a specific protein or epitope using or routinely modifying techniques described herein or otherwise known in the art.

[0225] The albumin fusion proteins of the invention comprising at least a fragment or variant of an antibody that binds a Therapeutic protein may be assayed for cross-reactivity with other antigens (e.g., molecules that have sequence/structure conservation with the molecule(s) specifically bound by the antibody that binds a Therapeutic protein (or fragment or variant thereof) corresponding to the Therapeutic protein portion of the albumin fusion protein of the invention) by any method known in the art.

[0226] Immunoassays which can be used to analyze (immunospecific) binding and cross-reactivity include, but are not limited to, competitive and non-competitive assay systems using techniques such as western blots, radioimmunoassays, ELISA (enzyme linked immunosorbent assay), “sandwich” immunoassays, immunoprecipitation assays, precipitin reactions, gel diffusion precipitin reactions, immunodiffusion assays, agglutination assays, complement-fixation assays, immunoradiometric assays, fluorescent immunoassays, and protein A immunoassays, to name but a few. Such assays are routine and well known in the art (see, e.g., Ausubel et al, eds, 1994, Current Protocols in Molecular Biology, Vol. 1, John Wiley & Sons, Inc., New York, which is incorporated by reference herein in its entirety). Exemplary immunoassays are described briefly below (but are not intended by way of limitation).

[0227] Immunoprecipitation protocols generally comprise lysing a population of cells in a lysis buffer such as RIPA buffer (1% NP-40 or Triton X-100, 1% sodium deoxycholate, 0.1% SDS, 0.15 M NaCl, 0.01 M sodium phosphate at pH 7.2, 1% Trasylol) supplemented with protein phosphatase and/or protease inhibitors (e.g., EDTA, PMSF, aprotinin, sodium vanadate), adding an antibody of the invention or albumin fusion protein of the invention comprising at least a fragment or variant of an antibody that binds a Therapeutic protein (or fragment or variant thereof) to the cell lysate, incubating for a period of time (e.g., 1 to 4 hours) at 40 degrees C., adding protein A and/or protein G sepharose beads (or beads coated with an appropriate anti-iditoypic antibody or anti-albumin antibody in the case when an albumin fusion protein comprising at least a fragment or variant of a Therapeutic antibody) to the cell lysate, incubating for about an hour or more at 40 degrees C., washing the beads in lysis buffer and resuspending the beads in SDS/sample buffer. The ability of the antibody or albumin fusion protein of the invention to immunoprecipitate a particular antigen can be assessed by, e.g., western blot analysis. One of skill in the art would be knowledgeable as to the parameters that can be modified to increase the binding of the antibody or albumin fusion protein to an antigen and decrease the background (e.g., pre-clearing the cell lysate with sepharose beads). For further discussion regarding immunoprecipitation protocols see, e.g., Ausubel et al, eds, 1994, Current Protocols in Molecular Biology, Vol. 1, John Wiley & Sons, Inc., New York at 10.16.1.

[0228] Western blot analysis generally comprises preparing protein samples, electrophoresis of the protein samples in a polyacrylamide gel (e.g., 8%-20% SDS-PAGE depending on the molecular weight of the antigen), transferring the protein sample from the polyacrylamide gel to a membrane such as nitrocellulose, PVDF or nylon, blocking the membrane in blocking solution (e.g., PBS with 3% BSA or non-fat milk), washing the membrane in washing buffer (e.g., PBS-Tween 20), applying the antibody or albumin fusion protein of the invention (diluted in blocking buffer) to the membrane, washing the membrane in washing buffer, applying a secondary antibody (which recognizes the albumin fusion protein, e.g., an anti-human serum albumin antibody) conjugated to an enzymatic substrate (e.g., horseradish peroxidase or alkaline phosphatase) or radioactive molecule (e.g., ³²P or ¹²⁵I) diluted in blocking buffer, washing the membrane in wash buffer, and detecting the presence of the antigen. One of skill in the art would be knowledgeable as to the parameters that can be modified to increase the signal detected and to reduce the background noise. For further discussion regarding western blot protocols see, e.g., Ausubel et al, eds, 1994, Current Protocols in Molecular Biology, Vol. 1, John Wiley & Sons, Inc., New York at 10.8.1.

[0229] ELISAs comprise preparing antigen, coating the well of a 96-well microtiter plate with the antigen, washing away antigen that did not bind the wells, adding the antibody or albumin fusion protein (comprising at least a fragment or variant of an antibody that binds a Therapeutic protein) of the invention conjugated to a detectable compound such as an enzymatic substrate (e.g., horseradish peroxidase or alkaline phosphatase) to the wells and incubating for a period of time, washing away unbound or non-specifically bound albumin fusion proteins, and detecting the presence of the antibody or albumin fusion proteins specifically bound to the antigen coating the well. In ELISAs the antibody or albumin fusion protein does not have to be conjugated to a detectable compound; instead, a second antibody (which recognizes the antibody or albumin fusion protein, respectively) conjugated to a detectable compound may be added to the well. Further, instead of coating the well with the antigen, antibody or the albumin fusion protein may be coated to the well. In this case, the detectable molecule could be the antigen conjugated to a detectable compound such as an enzymatic substrate (e.g., horseradish peroxidase or alkaline phosphatase). One of skill in the art would be knowledgeable as to the parameters that can be modified to increase the signal detected as well as other variations of ELISAs known in the art. For further discussion regarding ELISAs see, e.g., Ausubel et al, eds, 1994, Current Protocols in Molecular Biology, Vol. 1, John Wiley & Sons, Inc., New York at 11.2.1.

[0230] The binding affinity of an albumin fusion protein to a protein, antigen, or epitope and the off-rate of an antibody- or albumin fusion protein-protein/antigen/epitope interaction can be determined by competitive binding assays. One example of a competitive binding assay is a radioimmunoassay comprising the incubation of labeled antigen (e.g., ³H or ¹²⁵I) with the antibody or albumin fusion protein of the invention in the presence of increasing amounts of unlabeled antigen, and the detection of the antibody bound to the labeled antigen. The affinity of the antibody or albumin fusion protein of the present invention for a specific protein, antigen, or epitope and the binding off-rates can be determined from the data by Scatchard plot analysis. Competition with a second protein that binds the same protein, antigen or epitope as the antibody or albumin fusion protein, can also be determined using radioimmunoassays. In this case, the protein, antigen or epitope is incubated with an antibody or albumin fusion protein of the present invention conjugated to a labeled compound (e.g. ³H or ¹²⁵I) in the presence of increasing amounts of an unlabeled second protein that binds the same protein, antigen, or epitope as the albumin fusion protein of the invention.

[0231] In a preferred embodiment, BIAcore kinetic analysis is used to determine the binding on and off rates of antibody or albumin fusion proteins of the invention to a protein, antigen or epitope. BIAcore kinetic analysis comprises analyzing the binding and dissociation of antibodies, albumin fusion proteins, or specific polypeptides, antigens or epitopes from chips with immobilized specific polypeptides, antigens or epitopes, antibodies or albumin fusion proteins, respectively, on their surface.

[0232] Therapeutic Uses

[0233] The present invention is further directed to antibody-based therapies which involve administering antibodies of the invention or albumin fusion proteins of the invention comprising at least a fragment or variant of an antibody that binds a Therapeutic protein to an animal, preferably a mammal, and most preferably a human, patient for treating one or more of the disclosed diseases, disorders, or conditions. Therapeutic compounds of the invention include, but are not limited to, antibodies of the invention (including fragments, analogs and derivatives thereof as described herein), nucleic acids encoding antibodies of the invention (including fragments, analogs and derivatives thereof and anti-idiotypic antibodies as described herein), albumin fusion proteins of the invention comprising at least a fragment or variant of an antibody that binds a Therapeutic protein, and nucleic acids encoding such albumin fusion proteins. The antibodies of the invention or albumin fusion proteins of the invention comprising at least a fragment or variant of an antibody that binds a Therapeutic protein can be used to treat, inhibit or prevent diseases, disorders or conditions associated with aberrant expression and/or activity of a Therapeutic protein, including, but not limited to, any one or more of the diseases, disorders, or conditions described herein. The treatment and/or prevention of diseases, disorders, or conditions associated with aberrant expression and/or activity of a Therapeutic protein includes, but is not limited to, alleviating symptoms associated with those diseases, disorders or conditions antibodies of the invention or albumin fusion proteins of the invention comprising at least a fragment or variant of an antibody that binds a Therapeutic protein may be provided in pharmaceutically acceptable compositions as known in the art or as described herein.

[0234] In a specific and preferred embodiment, the present invention is directed to antibody-based therapies which involve administering antibodies of the invention or albumin fusion proteins of the invention comprising at least a fragment or variant of an antibody that binds a Therapeutic protein to an animal, preferably a mammal, and most preferably a human, patient for treating one or more diseases, disorders, or conditions, including but not limited to: neural disorders, immune system disorders, muscular disorders, reproductive disorders, gastrointestinal disorders, pulmonary disorders, cardiovascular disorders, renal disorders, proliferative disorders, and/or cancerous diseases and conditions., and/or as described elsewhere herein. Therapeutic compounds of the invention include, but are not limited to, antibodies of the invention (e.g., antibodies directed to the full length protein expressed on the cell surface of a mammalian cell; antibodies directed to an epitope of a Therapeutic protein and nucleic acids encoding antibodies of the invention (including fragments, analogs and derivatives thereof and anti-idiotypic antibodies as described herein). The antibodies of the invention can be used to treat, inhibit or prevent diseases, disorders or conditions associated with aberrant expression and/or activity of a Therapeutic protein, including, but not limited to, any one or more of the diseases, disorders, or conditions described herein. The treatment and/or prevention of diseases, disorders, or conditions associated with aberrant expression and/or activity of a Therapeutic protein includes, but is not limited to, alleviating symptoms associated with those diseases, disorders or conditions. Antibodies of the invention or albumin fusion proteins of the invention comprising at least a fragment or variant of an antibody that binds a Therapeutic protein may be provided in pharmaceutically acceptable compositions as known in the art or as described herein.

[0235] A summary of the ways in which the antibodies of the invention or albumin fusion proteins of the invention comprising at least a fragment or variant of an antibody that binds a Therapeutic protein may be used therapeutically includes binding Therapeutic proteins locally or systemically in the body or by direct cytotoxicity of the antibody, e.g. as mediated by complement (CDC) or by effector cells (ADCC). Some of these approaches are described in more detail below. Armed with the teachings provided herein, one of ordinary skill in the art will know how to use the antibodies of the invention or albumin fusion proteins of the invention comprising at-least a fragment or variant of an antibody that binds a Therapeutic protein for diagnostic, monitoring or therapeutic purposes without undue experimentation.

[0236] The antibodies of the invention or albumin fusion proteins of the invention comprising at least a fragment or variant of an antibody that binds a Therapeutic protein may be advantageously utilized in combination with other monoclonal or chimeric antibodies, or with lymphokines or hematopoietic growth factors (such as, e.g., IL-2, IL-3 and IL-7), for example, which serve to increase the number or activity of effector cells which interact with the antibodies.

[0237] The antibodies of the invention or albumin fusion proteins of the invention comprising at least a fragment or variant of an antibody that binds a Therapeutic protein may be administered alone or in combination with other types of treatments (e.g., radiation therapy, chemotherapy, hormonal therapy, immunotherapy and anti-tumor agents). Generally, administration of products of a species origin or species reactivity (in the case of antibodies) that is the same species as that of the patient is preferred. Thus, in a preferred embodiment, human antibodies, fragments derivatives, analogs, or nucleic acids, are administered to a human patient for therapy or prophylaxis.

[0238] It is preferred to use high affinity and/or potent in vivo inhibiting and/or neutralizing antibodies against Therapeutic proteins, fragments or regions thereof, (or the albumin fusion protein correlate of such an antibody) for both immunoassays directed to and therapy of disorders related to polynucleotides or polypeptides, including fragments thereof, of the present invention. Such antibodies, fragments, or regions, will preferably have an affinity for polynucleotides or polypeptides of the invention, including fragments thereof. Preferred binding affinities include dissociation constants or Kd's less than 5×10⁻² M, 10⁻² M, 5×10⁻³ M, 10⁻³ M, 5×10⁻⁴ M, 10⁻⁴ M. More preferred binding affinities include those with a dissociation constant or Kd less than 5×10⁻⁵ M, 10⁻⁵ M, 5×10⁻⁶ M, 10⁻⁶ M, 5×10⁻⁷ M, 10⁷ M, 5×10⁻⁸ M or 10⁻⁸ M. Even more preferred binding affinities include those with a dissociation constant or Kd less than 5×10⁻⁹ M, 10⁻⁹ M, 5×10⁻¹⁰ M, 10⁻¹⁰ M, 5×10⁻¹¹ M, 10⁻¹¹ M, 5×10⁻¹² M, ¹⁰⁻¹² M, 5×10⁻¹³ M, 10⁻¹³ M, 5×10⁻¹⁴ M, 10⁻¹⁴M, 5×10⁻¹⁵ M, or 10⁻¹⁵ M.

[0239] Gene Therapy

[0240] In a specific embodiment, nucleic acids comprising sequences encoding antibodies that bind therapeutic proteins or albumin fusion proteins comprising at least a fragment or varaint of an antibody that binds a Therapeutic protein are administered to treat, inhibit or prevent a disease or disorder associated with aberrant expression and/or activity of a Therapeutic protein, by way of gene therapy. Gene therapy refers to therapy performed by the administration to a subject of an expressed or expressible nucleic acid. In this embodiment of the invention, the nucleic acids produce their encoded protein that mediates a therapeutic effect.

[0241] Any of the methods for gene therapy available in the art can be used according to the present invention. Exemplary methods are described in more detail elsewhere in this application.

[0242] Demonstration of Therapeutic or Prophylactic Activity

[0243] The compounds or pharmaceutical compositions of the invention are preferably tested in vitro, and then in vivo for the desired therapeutic or prophylactic activity, prior to use in humans. For example, in vitro assays to demonstrate the therapeutic or prophylactic utility of a compound or pharmaceutical composition include, the effect of a compound on a cell line or a patient tissue sample. The effect of the compound or composition on the cell line and/or tissue sample can be determined utilizing techniques known to those of skill in the art including, but not limited to, rosette formation assays and cell lysis assays. In accordance with the invention, in vitro assays which can be used to determine whether administration of a specific compound is indicated, include in vitro cell culture assays in which a patient tissue sample is grown in culture, and exposed to or otherwise administered a compound, and the effect of such compound upon the tissue sample is observed.

[0244] Therapeutic/Prophylactic Administration and Composition

[0245] The invention provides methods of treatment, inhibition and prophylaxis by administration to a subject of an effective amount of a compound or pharmaceutical composition of the invention, preferably an antibody. In a preferred embodiment, the compound is substantially purified (e.g., substantially free from substances that limit its effect or produce undesired side-effects). The subject is preferably an animal, including but not limited to animals such as cows, pigs, horses, chickens, cats, dogs, etc., and is preferably a mammal, and most preferably human.

[0246] Formulations and methods of administration that can be employed when the compound comprises a nucleic acid or an immunoglobulin are described above; additional appropriate formulations and routes of administration can be selected from among those described herein below.

[0247] Various delivery systems are known and can be used to administer a compound of the invention, e.g., encapsulation in liposomes, microparticles, microcapsules, recombinant cells capable of expressing the compound, receptor-mediated endocytosis (see, e.g., Wu and Wu, J. Biol. Chem. 262:4429-4432 (1987)), construction of a nucleic acid as part of a retroviral or other vector, etc. Methods of introduction include but are not limited to intradermal, intramuscular, intraperitoneal, intravenous, subcutaneous, intranasal, epidural, and oral routes. The compounds or compositions may be administered by any convenient route, for example by infusion or bolus injection, by absorption through epithelial or mucocutaneous linings (e.g., oral mucosa, rectal and intestinal mucosa, etc.) and may be administered together with other biologically active agents. Administration can be systemic or local. In addition, it may be desirable to introduce the pharmaceutical compounds or compositions of the invention into the central nervous system by any suitable route, including intraventricular and intrathecal injection; intraventricular injection may be facilitated by an intraventricular catheter, for example, attached to a reservoir, such as an Ommaya reservoir. Pulmonary administration can also be employed, e.g., by use of an inhaler or nebulizer, and formulation with an aerosolizing agent.

[0248] In a specific embodiment, it may be desirable to administer the pharmaceutical compounds or compositions of the invention locally to the area in need of treatment; this may be achieved by, for example, and not by way of limitation, local infusion during surgery, topical application, e.g., in conjunction with a wound dressing after surgery, by injection, by means of a catheter, by means of a suppository, or by means of an implant, said implant being of a porous, non-porous, or gelatinous material, including membranes, such as sialastic membranes, or fibers. Preferably, when administering a protein, including an antibody, of the invention, care must be taken to use materials to which the protein does not absorb.

[0249] In another embodiment, the compound or composition can be delivered in a vesicle, in particular a liposome (see Langer, Science 249:1527-1533 (1990); Treat et al., in Liposomes in the Therapy of Infectious Disease and Cancer, Lopez-Berestein and Fidler (eds.), Liss, New York, pp. 353-365 (1989); Lopez-Berestein, ibid., pp. 317-327; see generally ibid.)

[0250] In yet another embodiment, the compound or composition can be delivered in a controlled release system. In one embodiment, a pump may be used (see Langer, supra; Sefton, CRC Crit. Ref. Biomed. Eng. 14:201 (1987); Buchwald et al., Surgery 88:507 (1980); Saudek et al., N. Engl. J. Med. 321:574 (1989)). In another embodiment, polymeric materials can be used (see Medical Applications of Controlled Release, Langer and Wise (eds.), CRC Pres., Boca Raton, Fla. (1974); Controlled Drug Bioavailability, Drug Product Design and Performance, Smolen and Ball (eds.), Wiley, New York (1984); Ranger and Peppas, J., Macromol. Sci. Rev. Macromol. Chem. 23:61 (1983); see also Levy et al., Science 228:190 (1985); During et al., Ann. Neurol. 25:351 (1989); Howard et al., J. Neurosurg. 71:105 (1989)). In yet another embodiment, a controlled release system can be placed in proximity of the therapeutic target, e.g., the brain, thus requiring only a fraction of the systemic dose (see, e.g., Goodson, in Medical Applications of Controlled Release, supra, vol. 2, pp. 115-138 (1984)).

[0251] Other controlled release systems are discussed in the review by Langer (Science 249:1527-1533 (1990)).

[0252] In a specific embodiment where the compound of the invention is a nucleic acid encoding a protein, the nucleic acid can be administered in vivo to promote expression of its encoded protein, by constructing it as part of an appropriate nucleic acid expression vector and administering it so that it becomes intracellular, e.g., by use of a retroviral vector (see U.S. Pat. No. 4,980,286), or by direct injection, or by use of microparticle bombardment (e.g., a gene gun; Biolistic, Dupont), or coating with lipids or cell-surface receptors or transfecting agents, or by administering it in linkage to a homeobox-like peptide which is known to enter the nucleus (see e.g., Joliot et al., Proc. Natl. Acad. Sci. USA 88:1864-1868 (1991)), etc. Alternatively, a nucleic acid can be introduced intracellularly and incorporated within host cell DNA for expression, by homologous recombination.

[0253] The present invention also provides pharmaceutical compositions. Such compositions comprise a therapeutically effective amount of a compound, and a pharmaceutically acceptable carrier. In a specific embodiment, the term “pharmaceutically acceptable” means approved by a regulatory agency of the Federal or a state government or listed in the U.S. Pharmacopeia or other generally recognized pharmacopeia for use in animals, and more particularly in humans. The term “carrier” refers to a diluent, adjuvant, excipient, or vehicle with which the therapeutic is administered. Such pharmaceutical carriers can be sterile liquids, such as water and oils, including those of petroleum, animal, vegetable or synthetic origin, such as peanut oil, soybean oil, mineral oil, sesame oil and the like. Water is a preferred carrier when the pharmaceutical composition is administered intravenously. Saline solutions and aqueous dextrose and glycerol solutions can also be employed as liquid carriers, particularly for injectable solutions. Suitable pharmaceutical excipients include starch, glucose, lactose, sucrose, gelatin, malt, rice, flour, chalk, silica gel, sodium stearate, glycerol monostearate, talc, sodium chloride, dried skim milk, glycerol, propylene, glycol, water, ethanol and the like. The composition, if desired, can also contain minor amounts of wetting or emulsifying agents, or pH buffering agents. These compositions can take the form of solutions, suspensions, emulsion, tablets, pills, capsules, powders, sustained-release formulations and the like. The composition can be formulated as a suppository, with traditional binders and carriers such as triglycerides. Oral formulation can include standard carriers such as pharmaceutical grades of mannitol, lactose, starch, magnesium stearate, sodium saccharine, cellulose, magnesium carbonate, etc. Examples of suitable pharmaceutical carriers are described in “Remington's Pharmaceutical Sciences” by E. W. Martin. Such compositions will contain a therapeutically effective amount of the compound, preferably in purified form, together with a suitable amount of carrier so as to provide the form for proper administration to the patient. The formulation should suit the mode of administration.

[0254] In a preferred embodiment, the composition is formulated in accordance with routine procedures as a pharmaceutical composition adapted for intravenous administration to human beings. Typically, compositions for intravenous administration are solutions in sterile isotonic aqueous buffer. Where necessary, the composition may also include a solubilizing agent and a local anesthetic such as lignocaine to ease pain at the site of the injection. Generally, the ingredients are supplied either separately or mixed together in unit dosage form, for example, as a dry lyophilized powder or water free concentrate in a hermetically sealed container such as an ampoule or sachette indicating the quantity of active agent. Where the composition is to be administered by infusion, it can be dispensed with an infusion bottle containing sterile pharmaceutical grade water or saline. Where the composition is administered by injection, an ampoule of sterile water for injection or saline can be provided so that the ingredients may be mixed prior to administration.

[0255] The compounds of the invention can be formulated as neutral or salt forms. Pharmaceutically acceptable salts include those formed with anions such as those derived from hydrochloric, phosphoric, acetic, oxalic, tartaric acids, etc., and those formed with cations such as those derived from sodium, potassium, ammonium, calcium, ferric hydroxides, isopropylamine, triethylamine, 2-ethylamino ethanol, histidine, procaine, etc.

[0256] The amount of the compound of the invention which will be effective in the treatment, inhibition and prevention of a disease or disorder associated with aberrant expression and/or activity of a Therapeutic protein can be determined by standard clinical techniques. In addition, in vitro assays may optionally be employed to help identify optimal dosage ranges. The precise dose to be employed in the formulation will also depend on the route of administration, and the seriousness of the disease or disorder, and should be decided according to the judgment of the practitioner and each patient's circumstances. Effective doses may be extrapolated from dose-response curves derived from in vitro or animal model test systems.

[0257] For antibodies, the dosage administered to a patient is typically 0.1 mg/kg to 100 mg/kg of the patient's body weight. Preferably, the dosage administered to a patient is between 0.1 mg/kg and 20 mg/kg of the patient's body weight, more preferably 1 mg/kg to 10 mg/kg of the patient's body weight. Generally, human antibodies have a longer half-life within the human body than antibodies from other species due to the immune response to the foreign polypeptides. Thus, lower dosages of human antibodies and less frequent administration is often possible. Further, the dosage and frequency of administration of antibodies of the invention may be reduced by enhancing uptake and tissue penetration (e.g., into the brain) of the antibodies by modifications such as, for example, lipidation.

[0258] Diagnosis and Imaging

[0259] Labeled antibodies and derivatives and analogs thereof that bind a Therapeutic protein (or fragment or variant thereof) (including albumin fusion proteins comprising at least a fragment or variant of an antibody that binds a Therapeutic protein), can be used for diagnostic purposes to detect, diagnose, or monitor diseases, disorders, and/or conditions associated with the aberrant expression and/or activity of Therapeutic protein. The invention provides for the detection of aberrant expression of a Therapeutic protein, comprising (a) assaying the expression of the Therapeutic protein in cells or body fluid of an individual using one or more antibodies specific to the polypeptide interest and (b) comparing the level of gene expression with a standard gene expression level, whereby an increase or decrease in the assayed Therapeutic protein expression level compared to the standard expression level is indicative of aberrant expression.

[0260] The invention provides a diagnostic assay for diagnosing a disorder, comprising (a) assaying the expression of the Therapeutic protein in cells or body fluid of an individual using one or more antibodies specific to the Therapeutic protein or albumin fusion proteins comprising at least a fragment of variant of an antibody specific to a Therapeutic protein, and (b) comparing the level of gene expression with a standard gene expression level, whereby an increase or decrease in the assayed Therapeutic protein gene expression level compared to the standard expression level is indicative of a particular disorder. With respect to cancer, the presence of a relatively high amount of transcript in biopsied tissue from an individual may indicate a predisposition for the development of the disease, or may provide a means for detecting the disease prior to the appearance of actual clinical symptoms. A more definitive diagnosis of this type may allow health professionals to employ preventative measures or aggressive treatment earlier thereby preventing the development or further progression of the cancer.

[0261] Antibodies of the invention or albumin fusion proteins comprising at least a fragment of variant of an antibody specific to a Therapeutic protein can be used to assay protein levels in a biological sample using classical immunohistological methods known to those of skill in the art (e.g., see Jalkanen et al., J. Cell. Biol. 101:976-985 (1985); Jalkanen et al., J. Cell. Biol. 105:3087-3096 (1987)). Other antibody-based methods useful for detecting protein gene expression include immunoassays, such as the enzyme linked immunosorbent assay (ELISA) and the radioimmunoassay (RIA). Suitable antibody assay labels are known in the art and include enzyme labels, such as, glucose oxidase; radioisotopes, such as iodine (125I, 121I), carbon (14C), sulfur (35S), tritium (3H), indium (112In), and technetium (99Tc); luminescent labels, such as luminol; and fluorescent labels, such as fluorescein and rhodamine, and biotin.

[0262] One facet of the invention is the detection and diagnosis of a disease or disorder associated with aberrant expression of a Therapeutic protein in an animal, preferably a mammal and most preferably a human. In one embodiment, diagnosis comprises: a) administering (for example, parenterally, subcutaneously, or intraperitoneally) to a subject an effective amount of a labeled molecule which specifically binds to the polypeptide of interest; b) waiting for a time interval following the administering for permitting the labeled molecule to preferentially concentrate at sites in the subject where the Therapeutic protein is expressed (and for unbound labeled molecule to be cleared to background level); c) determining background level; and d) detecting the labeled molecule in the subject, such that detection of labeled molecule above the background level indicates that the subject has a particular disease or disorder associated with aberrant expression of the therapeutic protein. Background level can be determined by various methods including, comparing the amount of labeled molecule detected to a standard value previously determined for a particular system.

[0263] It will be understood in the art that the size of the subject and the imaging system used will determine the quantity of imaging moiety needed to produce diagnostic images. In the case of a radioisotope moiety, for a human subject, the quantity of radioactivity injected will normally range from about 5 to 20 millicuries of 99 mTc. The labeled antibody, antibody fragment, or albumin fusion protein comprising at least a fragement or variant of an antibody that binds a Therapeutic protein will then preferentially accumulate at the location of cells which contain the specific Therapeutic protein. In vivo tumor imaging is described in S. W. Burchiel et al., “Immunopharmacokinetics of Radiolabeled Antibodies and Their Fragments.” (Chapter 13 in Tumor Imaging: The Radiochemical Detection of Cancer, S. W. Burchiel and B. A. Rhodes, eds., Masson Publishing Inc. (1982)).

[0264] Depending on several variables, including the type of label used and the mode of administration, the time interval following the administration for permitting the labeled molecule to preferentially concentrate at sites in the subject and for unbound labeled molecule to be cleared to background level is 6 to 48 hours or 6 to 24 hours or 6 to 12 hours. In another embodiment the time interval following administration is 5 to 20 days or 5 to 10 days.

[0265] In an embodiment, monitoring of the disease or disorder is carried out by repeating the method for diagnosing the disease or disease, for example, one month after initial diagnosis, six months after initial diagnosis, one year after initial diagnosis, etc.

[0266] Presence of the labeled molecule can be detected in the patient using methods known in the art for in vivo scanning. These methods depend upon the type of label used. Skilled artisans will be able to determine the appropriate method for detecting a particular label. Methods and devices that may be used in the diagnostic methods of the invention include, but are not limited to, computed tomography (CT), whole body scan such as position emission tomography (PET), magnetic resonance imaging (MRI), and sonography.

[0267] In a specific embodiment, the molecule is labeled with a radioisotope and is detected in the patient using a radiation responsive surgical instrument (Thurston et al., U.S. Pat. No. 5,441,050). In another embodiment, the molecule is labeled with a fluorescent compound and is detected in the patient using a fluorescence responsive scanning instrument. In another embodiment, the molecule is labeled with a positron emitting metal and is detected in the patent using positron emission-tomography. In yet another embodiment, the molecule is labeled with a paramagnetic label and is detected in a patient using magnetic resonance imaging (MRI).

[0268] Kits

[0269] The present invention provides kits that can be used in the above methods. In one embodiment, a kit comprises an antibody, preferably a purified antibody, in one or more containers. In a specific embodiment, the kits of the present invention contain a substantially isolated polypeptide comprising an epitope which is specifically immunoreactive with an antibody included in the kit. Preferably, the kits of the present invention further comprise a control antibody which does not react with the polypeptide of interest. In another specific embodiment, the kits of the present invention contain a means for detecting the binding of an antibody to a polypeptide of interest (e.g., the antibody may be conjugated to a detectable substrate such as a fluorescent compound, an enzymatic substrate, a radioactive compound or a luminescent compound, or a second antibody which recognizes the first antibody may be conjugated to a detectable substrate).

[0270] In another specific embodiment of the present invention, the kit is a diagnostic kit for use in screening serum containing antibodies specific against proliferative and/or cancerous polynucleotides and polypeptides. Such a kit may include a control antibody that does not react with the polypeptide of interest. Such a kit may include a substantially isolated polypeptide antigen comprising an epitope which is specifically immunoreactive with at least one anti-polypeptide antigen antibody. Further, such a kit includes means for detecting the binding of said antibody to the antigen (e.g., the antibody may be conjugated to a fluorescent compound such as fluorescein or rhodamine which can be detected by flow cytometry). In specific embodiments, the kit may include a recombinantly produced or chemically synthesized polypeptide antigen. The polypeptide antigen of the kit may also be attached to a solid support.

[0271] In a more specific embodiment the detecting means of the above-described kit includes a solid support to which said polypeptide antigen is attached. Such a kit may also include a non-attached reporter-labeled anti-human antibody. In this embodiment, binding of the antibody to the polypeptide antigen can be detected by binding of the said reporter-labeled antibody.

[0272] In an additional embodiment, the invention includes a diagnostic kit for use in screening serum containing antigens of the polypeptide of the invention. The diagnostic kit includes a substantially isolated antibody specifically immunoreactive with polypeptide or polynucleotide antigens, and means for detecting the binding of the polynucleotide or polypeptide antigen to the antibody. In one embodiment, the antibody is attached to a solid support. In a specific embodiment, the antibody may be a monoclonal antibody. The detecting means of the kit may include a second, labeled monoclonal antibody. Alternatively, or in addition, the detecting means may include a labeled, competing antigen.

[0273] In one diagnostic configuration, test serum is reacted with a solid phase reagent having a surface-bound antigen obtained by the methods of the present invention. After binding with specific antigen antibody to the reagent and removing unbound serum components by washing, the reagent is reacted with reporter-labeled-anti-human antibody to bind reporter to the reagent in proportion to the amount of bound anti-antigen antibody on the solid support. The reagent is again washed to remove unbound labeled antibody, and the amount of reporter associated with the reagent is determined. Typically, the reporter is an enzyme which is detected by incubating the solid phase in the presence of a suitable fluorometric, luminescent or colorimetric substrate (Sigma, St. Louis, Mo.).

[0274] The solid surface reagent in the above assay is prepared by known techniques for attaching protein material to solid support material, such as polymeric beads, dip sticks, 96-well plate or filter material. These attachment methods generally include non-specific adsorption of the protein to the support or covalent attachment of the protein, typically through a free amine group, to a chemically reactive group on the solid support, such as an activated carboxyl, hydroxyl, or aldehyde group. Alternatively, streptavidin coated plates can be used in conjunction with biotinylated antigen(s).

[0275] Thus, the invention provides an assay system or kit for carrying out this diagnostic method. The kit generally includes a support with surface-bound recombinant antigens, and a reporter-labeled anti-human antibody for detecting surface-bound anti-antigen antibody.

[0276] Albumin Fusion Proteins

[0277] The present invention relates generally to albumin fusion proteins and methods of treating, preventing, or ameliorating diseases or disorders. As used herein, “albumin fusion protein” refers to a protein formed by the fusion of at least one molecule of albumin (or a fragment or variant thereof) to at least one molecule of a Therapeutic protein (or fragment or variant thereof). An albumin fusion protein of the invention comprises at least a fragment or variant of a Therapeutic protein and at least a fragment or variant of human serum albumin, which are associated with one another, preferably by genetic fusion (i.e., the albumin fusion protein is generated by translation of a nucleic acid in which a polynucleotide encoding all or a portion of a Therapeutic protein is joined in-frame with a polynucleotide encoding all or a portion of albumin) or chemical conjugation to one another. The Therapeutic protein and albumin protein, once part of the albumin fusion protein, may be referred to as a “portion”, “region” or “moiety” of the albumin fusion protein.

[0278] In one embodiment, the invention provides an albumin fusion protein comprising, or alternatively consisting of, a Therapeutic protein (e.g., as described in Table 1) and a serum albumin protein. In other embodiments, the invention provides an albumin fusion protein comprising, or alternatively consisting of, a biologically active and/or therapeutically active fragment of a Therapeutic protein and a serum albumin protein. In other embodiments, the invention provides an albumin fusion protein comprising, or alternatively consisting of, a biologically active and/or therapeutically active variant of a Therapeutic protein and a serum albumin protein. In preferred embodiments, the serum albumin protein component of the albumin fusion protein is the mature portion of serum albumin.

[0279] In further embodiments, the invention provides an albumin fusion protein comprising, or alternatively consisting of, a Therapeutic protein, and a biologically active and/or therapeutically active fragment of serum albumin. In further embodiments, the invention provides an albumin fusion protein comprising, or alternatively consisting of, a Therapeutic protein and a biologically active and/or therapeutically active variant of serum albumin. In preferred embodiments, the Therapeutic protein portion of the albumin fusion protein is the mature portion of the Therapeutic protein.

[0280] In further embodiments, the invention provides an albumin fusion protein comprising, or alternatively consisting of, a biologically active and/or therapeutically active fragment or variant of a Therapeutic protein and a biologically active and/or therapeutically active fragment or variant of serum albumin. In preferred embodiments, the invention provides an albumin fusion protein comprising, or alternatively consisting of, the mature portion of a Therapeutic protein and the mature portion of serum albumin.

[0281] Preferably, the albumin fusion protein comprises HA as the N-terminal portion, and a Therapeutic protein as the C-terminal portion. Alternatively, an albumin fusion protein comprising HA as the C-terminal portion, and a Therapeutic protein as the N-terminal portion may also be used.

[0282] In other embodiments, the albumin fusion protein has a Therapeutic protein fused to both the N-terminus and the C-terminus of albumin. In a preferred embodiment, the Therapeutic proteins fused at the N- and C-termini are the same Therapeutic proteins. In a preferred embodiment, the Therapeutic proteins fused at the N- and C-termini are different Therapeutic proteins. In another preferred embodiment, the Therapeutic proteins fused at the N- and C-termini are different Therapeutic proteins which may be used to treat or prevent the same disease, disorder, or condition (e.g. as listed in the “Preferred Indication Y” column of Table 1). In another preferred embodiment, the Therapeutic proteins fused at the N- and C-termini are different Therapeutic proteins which may be used to treat or prevent diseases or disorders (e.g. as listed in the “Preferred Indication Y” column of Table 1) which are known in the art to commonly occur in patients simultaneously.

[0283] In addition to albumin fusion protein in which the albumin portion is fused N-terminal and/or C-terminal of the Therapeutic protein portion, albumin fusion proteins of the invention may also be produced by inserting the Therapeutic protein or peptide of interest (e.g., a Therapeutic protein X as diclosed in Table 1, or an antibody that binds a Therapeutic protein or a fragment or variant thereof) into an internal region of HA. For instance, within the protein sequence of the HA molecule a number of loops or turns exist between the end and beginning of α-helices, which are stabilized by disulphide bonds (see FIGS. 9-11). The loops, as determined from the crystal structure of HA (FIG. 13) (PDB identifiers IAO6, 1BJ5, 1BKE, 1BM0, 1E7E to 1E7I and 1UOR) for the most part extend away from the body of the molecule. These loops are useful for the insertion, or internal fusion, of therapeutically active peptides, particularly those requiring a secondary structure to be functional, or Therapeutic proteins, to essentially generate an albumin molecule with specific biological activity.

[0284] Loops in human albumin structure into which peptides or polypeptides may be inserted to generate albumin fusion proteins of the invention include: Val54-Asn61, Thr76-Asp89, Ala92-Glu100, Gln170-Ala176, His 247-Glu252, Glu 266-Glu277, Glu 280-His288, Ala362-Glu368, Lys439-Pro447,Val462-Lys475, Thr478-Pro486, and Lys560-Thr566. In more preferred embodiments, peptides or polypeptides are inserted into the Val54-Asn61, Gln170-Ala176, and/or Lys560-Thr566 loops of mature human albumin (SEQ ID NO: 18).

[0285] Peptides to be inserted may be derived from either phage display or synthetic peptide libraries screened for specific biological activity or from the active portions of a molecule with the desired function. Additionally, random peptide libraries may be generated within particular loops or by insertions of randomized peptides into particular loops of the HA molecule and in which all possible combinations of amino acids are represented.

[0286] Such library(s) could be generated on HA or domain fragments of HA by one of the following methods:

[0287] (a) randomized mutation of amino acids within one or more peptide loops of HA or HA domain fragments. Either one, more or all the residues within a loop could be mutated in this manner (for example see FIG. 10a);

[0288] (b) replacement of, or insertion into one or more loops of HA or HA domain fragments (i.e., internal fusion) of a randomized peptide(s) of length Xₙ (where X is an amino acid and n is the number of residues (for example see FIG. 10b);

[0289] (c) N-, C- or N- and C-terminal peptide/protein fusions in addition to (a) and/or (b).

[0290] The HA or HA domain fragment may also be made multifunctional by grafting the peptides derived from different screens of different loops against different targets into the same HA or HA domain fragment.

[0291] In preferred embodiments, peptides inserted into a loop of human serum albumin are peptide fragments or peptide variants of the Therapeutic proteins disclosed in Table 1. More particulary, the invention encompasses albumin fusion proteins which comprise peptide fragments or peptide variants at least 7 at least 8, at least 9, at least 10, at least 11, at least 12, at least 13, at least 14, at least 15, at least 20, at least 25, at least 30, at least 35, or at least 40 amino acids in length inserted into a loop of human serum albumin. The invention also encompasses albumin fusion proteins which comprise peptide fragments or peptide variants at least 7 at least 8, at least 9, at least 10, at least 11, at least 12, at least 13, at least 14, at least 15, at least 20, at least 25, at least 30, at least 35, or at least 40 amino acids fused to the N-terminus of human serum albumin. The invention also encompasses albumin fusion proteins which comprise peptide fragments or peptide variants at least 7 at least 8, at least 9, at least 10, at least 11, at least 12, at least 13, at least 14, at least 15, at least 20, at least 25, at least 30, at least 35, or at least 40 amino acids fused to the C-terminus of human serum albumin.

[0292] Generally, the albumin fusion proteins of the invention may have one HA-derived region and one Therapeutic protein-derived region. Multiple regions of each protein, however, may be used to make an albumin fusion protein of the invention. Similarly, more than one Therapeutic protein may be used to make an albumin fusion protein of the invention. For instance, a Therapeutic protein may be fused to both the N- and C-terminal ends of the HA. In such a configuration, the Therapeutic protein portions may be the same or different Therapeutic protein molecules. The structure of bifunctional albumin fusion proteins may be represented as: X-HA-Y or Y-HA-X.

[0293] For example, an anti-BLyS™ scFv-HA-IFNα-2b fusion may be prepared to modulate the immune response to IFNα-2b by anti-BLyS™ scFv. An alternative is making a bi (or even multi) functional dose of HA-fusions e.g. HA-IFNα-2b fusion mixed with HA-anti-BLyS™ scFv fusion or other HA-fusions in various ratio's depending on function, half-life etc.

[0294] Bi- or multi-functional albumin fusion proteins may also be prepared to target the Therapeutic protein portion of a fusion to a target organ or cell type via protein or peptide at the opposite terminus of HA.

[0295] As an alternative to the fusion of known therapeutic molecules, the peptides could be obtained by screening libraries constructed as fusions to the N-, C- or N- and C-termini of HA, or domain fragment of HA, of typically 6, 8, 12, 20 or 25 or Xₙ (where X is an amino acid (aa) and n equals the number of residues) randomized amino acids, and in which all possible combinations of amino acids were represented. A particular advantage of this approach is that the peptides may be selected in situ on the HA molecule and the properties of the peptide would therefore be as selected for rather than, potentially, modified as might be the case for a peptide derived by any other method then being attached to HA.

[0296] Additionally, the albumin fusion proteins of the invention may include a linker peptide between the fused portions to provide greater physical separation between the moieties and thus maximize the accessibility of the Therapeutic protein portion, for instance, for binding to its cognate receptor. The linker peptide may consist of amino acids such that it is flexible or more rigid.

[0297] The linker sequence may be cleavable by a protease or chemically to yield the growth hormone related moiety. Preferably, the protease is one which is produced naturally by the host, for example the S. cerevisiae protease kex2 or equivalent proteases.

[0298] Therefore, as described above, the albumin fusion proteins of the invention may have the following formula R1-L-R2; R2-L-R1; or R1-L-R2-L-R1, wherein R1 is at least one Therapeutic protein, peptide or polypeptide sequence, and not necessarily the same Therapeutic protein, L is a linker and R2 is a serum albumin sequence.

[0299] In preferred embodiments, Albumin fusion proteins of the invention comprising a Therapeutic protein have extended shelf life compared to the shelf life the same Therapeutic protein when not fused to albumin. Shelf-life typically refers to the time period over which the therapeutic activity of a Therapeutic protein in solution or in some other storage formulation, is stable without undue loss of therapeutic activity. Many of the Therapeutic proteins are highly labile in their unfused state. As described below, the typical shelf-life of these Therapeutic proteins is markedly prolonged upon incorporation into the albumin fusion protein of the invention.

[0300] Albumin fusion proteins of the invention with “prolonged” or “extended” shelf-life exhibit greater therapeutic activity relative to a standard that has been subjected to the same storage and handling conditions. The standard may be the unfused full-length Therapeutic protein. When the Therapeutic protein portion of the albumin fusion protein is an analog, a variant, or is otherwise altered or does not include the complete sequence for that protein, the prolongation of therapeutic activity may alternatively be compared to the unfused equivalent of that analog, variant, altered peptide or incomplete sequence. As an example, an albumin fusion protein of the invention may retain greater than about 100% of the therapeutic activity, or greater than about 105%, 110%, 120%, 130%, 150% or 200% of the therapeutic activity of a standard when subjected to the same storage and handling conditions as the standard when compared at a given time point.

[0301] Shelf-life may also be assessed in terms of therapeutic activity remaining after storage, normalized to therapeutic activity when storage began. Albumin fusion proteins of the invention with prolonged or extended shelf-life as exhibited by prolonged or extended therapeutic activity may retain greater than about 50% of the therapeutic activity, about 60%, 70%, 80%, or 90% or more of the therapeutic activity of the equivalent unfused Therapeutic protein when subjected to the same conditions. For example, as discussed in Example 1, an albumin fusion protein of the invention comprising hGH fused to the full length HA sequence may retain about 80% or more of its original activity in solution for periods of up to 5 weeks or more under various temperature conditions.

[0302] Expression of Fusion Proteins

[0303] The albumin fusion proteins of the invention may be produced as recombinant molecules by secretion from yeast, a microorganism such as a bacterium, or a human or animal cell line. Preferably, the polypeptide is secreted from the host cells. We have found that, by fusing the hGH coding sequence to the HA coding sequence, either to the 5′ end or 3′ end, it is possible to secrete the albumin fusion protein from yeast without the requirement for a yeast-derived pro sequence. This was surprising, as other workers have found that a yeast derived pro sequence was needed for efficient secretion of hGH in yeast.

[0304] For example, Hiramatsu et al. (Appl Environ Microbiol 56:2125 (1990); Appl Environ Microbiol 57:2052 (1991)) found that the N-terminal portion of the pro sequence in the Mucor pusillus rennin pre-pro leader was important. Other authors, using the MF -1 signal, have always included the MF -1 pro sequence when secreting hGH. The pro sequences were believed to assist in the folding of the hGH by acting as an intramolecular chaperone. The present invention shows that HA or fragments of HA can perform a similar function.

[0305] Hence, a particular embodiment of the invention comprises a DNA construct encoding a signal sequence effective for directing secretion in yeast, particularly a yeast-derived signal sequence (especially one which is homologous to the yeast host), and the fused molecule of the first aspect of the invention, there being no yeast-derived pro sequence between the signal and the mature polypeptide.

[0306] The Saccharomyces cerevisiae invertase signal is a preferred example of a yeast-derived signal sequence.

[0307] Conjugates of the kind prepared by Poznansky et al, (FEBS Lett. 239:18 (1988)), in which separately-prepared polypeptides are joined by chemical cross-linking, are not contemplated.

[0308] The present invention also includes a cell, preferably a yeast cell transformed to express an albumin fusion protein of the invention. In addition to the transformed host cells themselves, the present invention also contemplates a culture of those cells, preferably a monoclonal (clonally homogeneous) culture, or a culture derived from a monoclonal culture, in a nutrient medium. If the polypeptide is secreted, the medium will contain the polypeptide, with the cells, or without the cells if they have been filtered or centrifuged away. Many expression systems are known and may be used, including bacteria (for example E. coli and Bacillus subtilis), yeasts (for example Saccharomyces cerevisiae, Kluyveromyces lactis and Pichia pastoris, filamentous fungi (for example Aspergillus), plant cells, animal cells and insect cells.

[0309] Preferred yeast strains to be used in the production of albumin fusion proteins are D88, DXY1 and BXP10. D88 [leu2-3, leu2-122, canI, praI, ubc4] is a derivative of parent strain AH22his⁺ (also known as DB1; see, e.g., Sleep et al. Biotechnology 8:42-46 (1990)). The strain contains a leu2 mutation which allows for auxotropic selection of 2 micron-based plasmids that contain the LEU2 gene. D88 also exhibits a derepression of PRB1 in glucose excess. The PRB1 promoter is normally controlled by two checkpoints that monitor glucose levels and growth stage. The promoter is activated in wild type yeast upon glucose depletion and entry into stationary phase. Strain D88 exhibits the repression by glucose but maintains the induction upon entry into stationary phase. The PRA1 gene encodes a yeast vacuolar protease, YscA endoprotease A, that is localized in the ER. The UBC4 gene is in the ubiquitination pathway and is involved in targeting short lived and abnormal proteins for ubiquitin dependant degradation. Isolation of this ubc4 mutation was found to increase the copy number of an expression plasmid in the cell and cause an increased level of expression of a desired protein expressed from the plasmid (see, e.g., International Publication No. WO99/00504, hereby incorporated in its entirety by reference herein).

[0310] DXY1, a derivative of D88, has the following genotype: [leu2-3, leu2-122, canI, pra1, ubc4, ura3::yap3]. In addition to the mutations isolated in D88, this strain also has a knockout of the YAP3 protease. This protease causes cleavage of mostly di-basic residues (RR, RK, KR, KK) but can also promote cleavage at single basic residues in proteins. Isolation of this yap3 mutation resulted in higher levels of full length HSA production (see, e.g., U.S. Pat. No. 5,965,386 and Kerry-Williams et al., Yeast 14:161-169 (1998), hereby incorporated in their entireties by reference herein).

[0311] BXP10 has the following genotype: leu2-3, leu2-122, can1, pra1, ubc4, ura3, yap3::URA3, lys2, hsp150::LYS2, pmt1::URA3. In addition to the mutations isolated in DXY1, this strain also has a knockout of the PMT1 gene and the HSP150 gene. The PMT1 gene is a member of the evolutionarily conserved family of dolichyl-phosphate-D-mannose protein O-mannosyltransferases (Pmts). The transmembrane topology of Pmt1p suggests that it is an integral membrane protein of the endoplasmic reticulum with a role in O-linked glycosylation. This mutation serves to reduce/eliminate O-linked glycosylation of HSA fusions (see, e.g., International Publication No. WO00/44772, hereby incorporated in its entirety by reference herein). Studies revealed that the Hsp150 protein is inefficiently separated from rHA by ion exchange chromatography. The mutation in the HSP150 gene removes a potential contaminant that has proven difficult to remove by standard purification techniques. See, e.g., U.S. Pat. No. 5,783,423, hereby incorporated in its entirety by reference herein.

[0312] The desired protein is produced in conventional ways, for example from a coding sequence inserted in the host chromosome or on a free plasmid. The yeasts are transformed with a coding sequence for the desired protein in any of the usual ways, for example electroporation. Methods for transformation of yeast by electroporation are disclosed in Becker & Guarente (1990) Methods Enzymol. 194, 182.

[0313] Successfully transformed cells, i.e., cells that contain a DNA construct of the present invention, can be identified by well known techniques. For example, cells resulting from the introduction of an expression construct can be grown to produce the desired polypeptide. Cells can be harvested and lysed and their DNA content examined for the presence of the DNA using a method such as that described by Southern (1975) J. Mol. Biol. 98, 503 or Berent et al. (1985) Biotech. 3, 208. Alternatively, the presence of the protein in the supernatant can be detected using antibodies.

[0314] Useful yeast plasmid vectors include pRS403-406 and pRS413-416 and are generally available from Stratagene Cloning Systems, La Jolla, Calif. 92037, USA. Plasmids pRS403, pRS404, pRS405 and pRS406 are Yeast Integrating plasmids (YIps) and incorporate the yeast selectable markers HIS3, 7RP1, LEU2 and URA3. Plasmids pRS413-416 are Yeast Centromere plasmids (Ycps).

[0315] Preferred vectors for making albumin fusion proteins for expression in yeast include pPPC0005, pScCHSA, pScNHSA, and pC4:HSA which are described in detail in Example 2. FIG. 4 shows a map of the pPPC0005 plasmid that can be used as the base vector into which polynucleotides encoding Therapeutic proteins may be cloned to form HA-fusions. It contains a PRB1 S. cerevisiae promoter (PRB1p), a Fusion leader sequence (FL), DNA encoding HA (rHA) and an ADH1 S. cerevisiae terminator sequence. The sequence of the fusion leader sequence consists of the first 19 amino acids of the signal peptide of human serum albumin (SEQ ID NO:29) and the last five amino acids of the mating factor alpha 1 promoter (SLDKR, see EP-A-387 319 which is hereby incorporated by reference in its entirety.

[0316] The plasmids, pPPC0005, pScCHSA, pScNHSA, and pC4:HSA were deposited on Apr. 11, 2001 at the American Type Culture Collection, 10801 University Boulevard, Manassas, Va. 20110-2209 and given accession numbers ATCC ______, ______, ______, and ______, respectively. Another vector useful for expressing an albumin fusion protein in yeast the pSAC35 vector which is described in Sleep et al., BioTechnology 8:42 (1990) which is hereby incorporated by reference in its entirety.

[0317] A variety of methods have been developed to operably link DNA to vectors via complementary cohesive termini. For instance, complementary homopolymer tracts can be added to the DNA segment to be inserted to the vector DNA. The vector and DNA segment are then joined by hydrogen bonding between the complementary homopolymeric tails to form recombinant DNA molecules.

[0318] Synthetic linkers containing one or more restriction sites provide an alternative method of joining the DNA segment to vectors. The DNA segment, generated by endonuclease restriction digestion, is treated with bacteriophage T4 DNA polymerase or E. coli DNA polymerase I, enzymes that remove protruding, -single-stranded termini with their 3′ 5′-exonucleolytic activities, and fill in recessed 3′-ends with their polymerizing activities.

[0319] The combination of these activities therefore generates blunt-ended DNA segments. The blunt-ended segments are then incubated with a large molar excess of linker molecules in the presence of an enzyme that is able to catalyze the ligation of blunt-ended DNA molecules, such as bacteriophage T4 DNA ligase. Thus, the products of the reaction are DNA segments carrying polymeric linker sequences at their ends. These DNA segments are then cleaved with the appropriate restriction enzyme and ligated to an expression vector that has been cleaved with an enzyme that produces termini compatible with those of the DNA segment.

[0320] Synthetic linkers containing a variety of restriction endonuclease sites are commercially available from a number of sources including International Biotechnologies Inc, New Haven, Conn., USA.

[0321] A desirable way to modify the DNA in accordance with the invention, if, for example, HA variants are to be prepared, is to use the polymerase chain reaction as disclosed by Saiki et al. (1988) Science 239, 487-491. In this method the DNA to be enzymatically amplified is flanked by two specific oligonucleotide primers which themselves become incorporated into the amplified DNA. The specific primers may contain restriction endonuclease recognition sites which can be used for cloning into expression vectors using methods known in the art.

[0322] Exemplary genera of yeast contemplated to be useful in the practice of the present invention as hosts for expressing the albumin fusion proteins are Pichia (Hansenula), Saccharomyces, Kluyveromyces, Candida, Torulopsis, Torulaspora, Schizosaccharomyces, Citeromyces, Pachysolen, Debaromyces, Metschunikowia, Rhodosporidium, Leucosporidium, Botryoascus, Sporidiobolus, Endomycopsis, and the like. Preferred genera are those selected from the group consisting of Saccharomyces, Schizosaccharomyces, Kluyveromyces, Pichia and Torulaspora. Examples of Saccharomyces spp. are S. cerevisiae, S. italicus and S. rouxii.

[0323] Examples of Kluyveromyces spp. are K. fragilis, K. lactis and K. marxianus. A suitable Torulaspora species is T. delbrueckii. Examples of Pichia (Hansenula) spp. are P. angusta (formerly H. polymorpha), P. anomala (formerly H. anomala) and P. pastoris. Methods for the transformation of S. cerevisiae are taught generally in EP 251 744, EP 258 067 and WO 90/01063, all of which are incorporated herein by reference.

[0324] Preferred exemplary species of Saccharomyces include S. cerevisiae, S. italicus, S. diastaticus, and Zygosaccharomyces rouxii. Preferred exemplary species of Kluyveromyces include K. fragilis and K. lactis. Preferred exemplary species of Hansenula include H. polymorpha (now Pichia angusta), H. anomala (now Pichia anomala), and Pichia capsulata. Additional preferred exemplary species of Pichia include P. pastoris. Preferred exemplary species of Aspergillus include A. niger and A. nidulans. Preferred exemplary species of Yarrowia include Y. lipolytica. Many preferred yeast species are available from the ATCC. For example, the following preferred yeast species are available from the ATCC and are useful in the expression of albumin fusion proteins: Saccharomyces cerevisiae Hansen, teleomorph strain BY4743 yap3 mutant (ATCC Accession No. 4022731); Saccharomyces cerevisiae Hansen, teleomorph strain BY4743 hsp150 mutant (ATCC Accession No. 4021266); Saccharomyces cerevisiae Hansen, teleomorph strain BY4743 pmt1 mutant (ATCC Accession No. 4023792); Saccharomyces cerevisiae Hansen, teleomorph (ATCC Accession Nos. 20626; 44773; 44774; and 62995); Saccharomyces diastaticus Andrews et Gilliland ex van der Walt, teleomorph (ATCC Accession No. 62987); Kluyveromyces lactis (Dombrowski) van der Walt, teleomorph (ATCC Accession No. 76492); Pichia angusta (Teunisson et al.) Kurtzman, teleomorph deposited as Hansenula polymorpha de Morais et Maia, teleomorph (ATCC Accession No. 26012); Aspergillus niger van Tieghem, anamorph (ATCC Accession No. 9029); Aspergillus niger van Tieghem, anamorph (ATCC Accession No. 16404); Aspergillus nidulans (Eidam) Winter, anamorph (ATCC Accession No. 48756); and Yarrowia lipolytica (Wickerham et al.) van der Walt et von Arx, teleomorph (ATCC Accession No. 201847).

[0325] Suitable promoters for S. cerevisiae include those associated with the PGKI gene, GAL1 or GAL10 genes, CYCI, PHO5, TRPI, ADHI, ADH2, the genes for glyceraldehyde-3-phosphate dehydrogenase, hexokinase, pyruvate decarboxylase, phosphofructokinase, triose phosphate isomerase, phosphoglucose isomerase, glucokinase, alpha-mating factor pheromone, [a mating factor pheromone], the PRBI promoter, the GUT2 promoter, the GPDI promoter, and hybrid promoters involving hybrids of parts of 5′ regulatory regions with parts of 5′ regulatory regions of other promoters or with upstream activation sites (e.g. the promoter of EP-A-258 067).

[0326] Convenient regulatable promoters for use in Schizosaccharomyces pombe are the thiamine-repressible promoter from the nmt gene as described by Maundrell (1990) J. Biol. Chem. 265, 10857-10864 and the glucose repressible jbp1 gene promoter as described by Hoffman & Winston (1990) Genetics 124, 807-816.

[0327] Methods of transforming Pichia for expression of foreign genes are taught in, for example, Cregg et al. (1993), and various Phillips patents (e.g. U.S. Pat. No. 4,857,467, incorporated herein by reference), and Pichia expression kits are commercially available from Invitrogen BV, Leek, Netherlands, and Invitrogen Corp., San Diego, Calif. Suitable promoters include AOXI and AOX2. Gleeson et al. (1986) J. Gen. Microbiol. 132, 3459-3465 include information on Hansenula vectors and transformation, suitable promoters being MOX1 and FMD1; whilst EP 361 991, Fleer et al. (1991) and other-publications from Rhone-Poulenc Rorer teach how to express foreign proteins in Kluyveromyces spp., a suitable promoter being PGKI.

[0328] The transcription termination signal is preferably the 3′ flanking sequence of a eukaryotic gene which contains proper signals for transcription termination and polyadenylation. Suitable 3′ flanking sequences may, for example, be those of the gene naturally linked to the expression control sequence used, i.e. may correspond to the promoter. Alternatively, they may be different in which case the termination signal of the S. cerevisiae ADHI gene is preferred.

[0329] The desired albumin fusion protein may be initially expressed with a secretion leader sequence, which may be any leader effective in the yeast chosen. Leaders useful in S. cerevisiae include that from the mating factor polypeptide (MF -1) and the hybrid leaders of EP-A-387 319. Such leaders (or signals) are cleaved by the yeast before the mature albumin is released into the surrounding medium. Further such leaders include those of S. cerevisiae invertase (SUC2) disclosed in JP 62-096086 (granted as 911036516), acid phosphatase (PH05), the pre-sequence of MFoz-1, 0 glucanase (BGL2) and killer toxin; S. diastaticus glucoamylase II; S. carlsbergensis-galactosidase (MEL1); K. lactis killer toxin; and Candida glucoarnylase.

[0330] Additional Methods of Recombinant and Synthetic Production of Albumin Fusion Proteins

[0331] The present invention also relates to vectors containing a polynucleotide encoding an albumin fusion protein of the present invention, host cells, and the production of albumin fusion proteins by synthetic and recombinant techniques. The vector may be, for example, a phage, plasmid, viral, or retroviral vector. Retroviral vectors may be replication competent or replication defective. In the latter case, viral propagation generally will occur only in complementing host cells.

[0332] The polynucleotides encoding albumin fusion proteins of the invention may be joined to a vector containing a selectable marker for propagation in a host. Generally, a plasmid vector is introduced in a precipitate, such as a calcium phosphate precipitate, or in a complex with a charged lipid. If the vector is a virus, it may be packaged in vitro using an appropriate packaging cell line and then transduced into host cells.

[0333] The polynucleotide insert should be operatively linked to an appropriate promoter, such as the phage lambda PL promoter, the E. coli lac, trp, phoA and tac promoters, the SV40 early and late promoters and promoters of retroviral LTRs, to name a few. Other suitable promoters will be known to the skilled artisan. The expression constructs will further contain sites for transcription initiation, termination, and, in the transcribed region, a ribosome binding site for translation. The coding portion of the transcripts expressed by the constructs will preferably include a translation initiating codon at the beginning and a termination codon (UAA, UGA or UAG) appropriately positioned at the end of the polypeptide to be translated.

[0334] As indicated, the expression vectors will preferably include at least one selectable marker. Such markers include dihydrofolate reductase, G418, glutamine synthase, or neomycin resistance for eukaryotic cell culture, and tetracycline, kanamycin or ampicillin resistance genes for culturing in E. coli and other bacteria. Representative examples of appropriate hosts include, but are not limited to, bacterial cells, such as E. coli, Streptomyces and Salmonella typhimurium cells; fungal cells, such as yeast cells (e.g., Saccharomyces cerevisiae or Pichia pastoris (ATCC Accession No. 201178)); insect cells such as Drosophila S2 and Spodoptera Sf9 cells; animal cells such as CHO, COS, NSO, 293, and Bowes melanoma cells; and plant cells. Appropriate culture mediums and conditions for the above-described host cells are known in the art.

[0335] Among vectors preferred for use in bacteria include pQE70, pQE60 and pQE-9, available from QIAGEN, Inc.; pBluescript vectors, Phagescript vectors, pNH8A, pNH16a, pNH18A, pNH46A, available from Stratagene Cloning Systems, Inc.; and ptrc99a, pKK223-3, pKK233-3, pDR540, pRIT5 available from Pharmacia Biotech, Inc. Among preferred eukaryotic vectors are pWLNEO, pSV2CAT, pOG44, pXT1 and pSG available from Stratagene; and pSVK3, pBPV, pMSG and pSVL available from Pharmacia. Preferred expression vectors for use in yeast systems include, but are not limited to pYES2, pYD1, pTEF1/Zeo, pYES2/GS, pPICZ, pGAPZ, pGAPZalph, pPIC9, pPIC3.5, pHIL-D2, pHIL-S1, pPIC3.5K, pPIC9K, and PAO815 (all available from Invitrogen, Carlbad, Calif.). Other suitable vectors will be readily apparent to the skilled artisan.

[0336] In one embodiment, polynucleotides encoding an albumin fusion protein of the invention may be fused to signal sequences which will direct the localization of a protein of the invention to particular compartments of a prokaryotic or eukaryotic cell and/or direct the secretion of a protein of the invention from a prokaryotic or eukaryotic cell. For example, in E. coli, one may wish to direct the expression of the protein to the periplasmic space. Examples of signal sequences or proteins (or fragments thereof) to which the albumin fusion proteins of the invention may be fused in order to direct the expression of the polypeptide to the periplasmic space of bacteria include, but are not limited to, the pelB signal sequence, the maltose binding protein (MBP) signal sequence, MBP, the ompA signal sequence, the signal sequence of the periplasmic E. coli heat-labile enterotoxin B-subunit, and the signal sequence of alkaline phosphatase. Several vectors are commercially available for the construction of fusion proteins which will direct the localization of a protein, such as the pMAL series of vectors (particularly the pMAL-p series) available from New England Biolabs. In a specific embodiment, polynucleotides albumin fusion proteins of the invention may be fused to the pelB pectate lyase signal sequence to increase the efficiency of expression and purification of such polypeptides in Gram-negative bacteria. See, U.S. Pat. Nos. 5,576,195 and 5,846,818, the contents of which are herein incorporated by reference in their entireties.

[0337] Examples of signal peptides that may be fused to an albumin fusion protein of the invention in order to direct its secretion in mammalian cells include, but are not limited to, the MPIF-1 signal sequence (e.g., amino acids 1-21 of GenBank Accession number AAB51134), the stanniocalcin signal sequence (MLQNSAVLLLLVISASA, SEQ ID NO:34), and a consensus signal sequence (MPTWAWWLFLVLLLALWAPARG, SEQ ID NO:35). A suitable signal sequence that may be used in conjunction with baculoviral expression systems is the gp67 signal sequence (e.g., amino acids 1-19 of GenBank Accession Number AAA72759).

[0338] Vectors which use glutamine synthase (GS) or DHFR as the selectable markers can be amplified in the presence of the drugs methionine sulphoximine or methotrexate, respectively. An advantage of glutamine synthase based vectors are the availabilty of cell lines (e.g., the murine myeloma cell line, NSO) which are glutamine synthase negative. Glutamine synthase expression systems can also function in glutamine synthase expressing cells (e.g., Chinese Hamster Ovary (CHO) cells) by providing additional inhibitor to prevent the functioning of the endogenous gene. A glutamine synthase expression system and components thereof are detailed in PCT publications: WO87/04462; WO86/05807; WO89/01036; WO89/10404; and WO91/06657, which are hereby incorporated in their entireties by reference herein. Additionally, glutamine synthase expression vectors can be obtained from Lonza Biologics, Inc. (Portsmouth, N.H.). Expression and production of monoclonal antibodies using a GS expression system in murine myeloma cells is described in Bebbington et al., Bio/technology 10:169(1992) and in Biblia and Robinson Biotechnol. Prog. 11:1 (1995) which are herein incorporated by reference.

[0339] The present invention also relates to host cells containing the above-described vector constructs described herein, and additionally encompasses host cells containing nucleotide sequences of the invention that are operably associated with one or more heterologous control regions (e.g., promoter and/or enhancer) using techniques known of in the art. The host cell can be a higher eukaryotic cell, such as a mammalian cell (e.g., a human derived cell), or a lower eukaryotic cell, such as a yeast cell, or the host cell can be a prokaryotic cell, such as a bacterial cell. A host strain may be chosen which modulates the expression of the inserted gene sequences, or modifies and processes the gene product in the specific fashion desired. Expression from certain promoters can be elevated in the presence of certain inducers; thus expression of the genetically engineered polypeptide may be controlled. Furthermore, different host cells have characteristics and specific mechanisms for the translational and post-translational processing and modification (e.g., phosphorylation, cleavage) of proteins. Appropriate cell lines can be chosen to ensure the desired modifications and processing of the foreign protein expressed.

[0340] Introduction of the nucleic acids and nucleic acid constructs of the invention into the host cell can be effected by calcium phosphate transfection, DEAE-dextran mediated transfection, cationic lipid-mediated transfection, electroporation, transduction, infection, or other methods. Such methods are described in many standard laboratory manuals, such as Davis et al., Basic Methods In Molecular Biology (1986). It is specifically contemplated that the polypeptides of the present invention may in fact be expressed by a host cell lacking a recombinant vector.

[0341] In addition to encompassing host cells containing the vector constructs discussed herein, the invention also encompasses primary, secondary, and immortalized host cells of vertebrate origin, particularly mammalian origin, that have been engineered to delete or replace endogenous genetic material (e.g., the coding sequence corresponding to a Therapeutic protein may be replaced with an albumin fusion protein corresponding to the Therapeutic protein), and/or to include genetic material (e.g., heterologous polynucleotide sequences such as for example, an albumin fusion protein of the invention corresponding to the Therapeutic protein may be included). The genetic material operably associated with the endogenous polynucleotide may activate, alter, and/or amplify endogenous polynucleotides.

[0342] In addition, techniques known in the art may be used to operably associate heterologous polynucleotides (e.g., polynucleotides encoding an albumin protein, or a fragment or variant thereof) and/or heterologous control regions (e.g., promoter and/or enhancer) with endogenous polynucleotide sequences encoding a Therapeutic protein via homologous recombination (see, e.g., U.S. Pat. No. 5,641,670, issued Jun. 24, 1997; International Publication Number WO 96/29411; International Publication Number WO 94/12650; Koller et al., Proc. Natl. Acad. Sci. USA 86:8932-8935 (1989); and Zijlstra et al., Nature 342:435-438 (1989), the disclosures of each of which are incorporated by reference in their entireties).

[0343] Albumin fusion proteins of the invention can be recovered and purified from recombinant cell cultures by well-known methods including ammonium sulfate or ethanol precipitation, acid extraction, anion or cation exchange chromatography, phosphocellulose chromatography, hydrophobic interaction chromatography, affinity chromatography, hydroxylapatite chromatography, hydrophobic charge interaction chromatography and lectin chromatography. Most preferably, high performance liquid chromatography (“HPLC”) is employed for purification.

[0344] In preferred embodiments the albumin fusion proteins of the invention are purified using Anion Exchange Chromatography including, but not limited to, chromatography on Q-sepharose, DEAE sepharose, poros HQ, poros DEAE, Toyopearl Q, Toyopearl QAE, Toyopearl DEAE, Resource/Source Q and DEAE, Fractogel Q and DEAE columns.

[0345] In specific embodiments the albumin fusion proteins of the invention are purified using Cation Exchange Chromatography including, but not limited to, SP-sepharose, CM sepharose, poros HS, poros CM, Toyopearl SP, Toyopearl CM, Resource/Source S and CM, Fractogel S and CM columns and their equivalents and comparables.

[0346] In specific embodiments the albumin fusion proteins of the invention are purified using Hydrophobic Interaction Chromatography including, but not limited to, Phenyl, Butyl, Methyl, Octyl, Hexyl-sepharose, poros Phenyl, Butyl, Methyl, Octyl, Hexyl Toyopearl Phenyl, Butyl, Methyl, Octyl, Hexyl Resource/Source Phenyl, Butyl, Methyl, Octyl, Hexyl, Fractogel Phenyl, Butyl, Methyl, Octyl, Hexyl columns and their equivalents and comparables.

[0347] In specific embodiments the albumin fusion proteins of the invention are purified using Size Exclusion Chromatography including, but not limited to, sepharose S100, S200, S300, superdex resin columns and their equivalents and comparables.

[0348] In specific embodiments the albumin fusion proteins of the invention are purified using Affinity Chromatography including, but not limited to, Mimetic Dye affinity, peptide affinity and antibody affinity columns that are selective for either the HSA or the “fusion target” molecules.

[0349] In preferred embodiments albumin fusion proteins of the invention are purified using one or more Chromatography methods listed above. In other preferred embodiments, albumin fusion proteins of the invention are purified using one or more of the following Chromatography columns, Q sepharose FF column, SP Sepharose FF column, Q Sepharose High Performance Column, Blue Sepharose FF column, Blue Column, Phenyl Sepharose FF column, DEAE Sepharose FF, or Methyl Column.

[0350] Additionally, albumin fusion proteins of the invention may be purified using the process described in PCT International Publication WO 00/44772 which is herein incorporated by reference in its entirety. One of skill in the art could easily modify the process described therein for use in the purification of albumin fusion proteins of the invention.

[0351] Albumin fusion proteins of the present invention may be recovered from: products of chemical synthetic procedures; and products produced by recombinant techniques from a prokaryotic or eukaryotic host, including, for example, bacterial, yeast, higher plant, insect, and mammalian cells. Depending upon the host employed in a recombinant production procedure, the polypeptides of the present invention may be glycosylated or may be non-glycosylated. In addition, albumin fusion proteins of the invention may also include an initial modified methionine residue, in some cases as a result of host-mediated processes. Thus, it is well known in the art that the N-terminal methionine encoded by the translation initiation codon generally is removed with high efficiency from any protein after translation in all eukaryotic cells. While the N-terminal methionine on most proteins also is efficiently removed in most prokaryotes, for some proteins, this prokaryotic removal process is inefficient, depending on the nature of the amino acid to which the N-terminal methionine is covalently linked.

[0352] In one embodiment, the yeast Pichia pastoris is used to express albumin fusion proteins of the invention in a eukaryotic system. Pichia pastoris is a methylotrophic yeast which can metabolize methanol as its sole carbon source. A main step in the methanol metabolization pathway is the oxidation of methanol to formaldehyde using O₂. This reaction is catalyzed by the enzyme alcohol oxidase. In order to metabolize methanol as its sole carbon source, Pichia pastoris must generate high levels of alcohol oxidase due, in part, to the relatively low affinity of alcohol oxidase for O₂. Consequently, in a growth medium depending on methanol as a main carbon source, the promoter region of one of the two alcohol oxidase genes (AOX1) is highly active. In the presence of methanol, alcohol oxidase produced from the AOX1 gene comprises up to approximately 30% of the total soluble protein in Pichia pastoris. See Ellis, S. B., et al., Mol. Cell. Biol. 5:1111-21 (1985); Koutz, P. J, et al., Yeast 5:167-77 (1989); Tschopp, J. F., et al., Nucl. Acids Res. 15:3859-76 (1987). Thus, a heterologous coding sequence, such as, for example, a polynucleotide of the present invention, under the transcriptional regulation of all or part of the AOX1 regulatory sequence is expressed at exceptionally high levels in Pichia yeast grown in the presence of methanol.

[0353] In one example, the plasmid vector pPIC9K is used to express DNA encoding an albumin fusion protein of the invention, as set forth herein, in a Pichea yeast system essentially as described in “Pichia Protocols: Methods in Molecular Biology,” D. R. Higgins and J. Cregg, eds. The Humana Press, Totowa, N.J., 1998. This expression vector allows expression and secretion of a polypeptide of the invention by virtue of the strong AOX1 promoter linked to the Pichia pastoris alkaline phosphatase (PHO) secretory signal peptide (i.e., leader) located upstream of a multiple cloning site.

[0354] Many other yeast vectors could be used in place of pPIC9K, such as, pYES2, pYD1, pTEF1/Zeo, pYES2/GS, pPICZ, pGAPZ, pGAPZalpha, pPIC9, pPIC3.5, pHIL-D2, pHIL-S1, pPIC3.5K, and PAO815, as one skilled in the art would readily appreciate, as long as the proposed expression construct provides appropriately located signals for transcription, translation, secretion (if desired), and the like, including an in-frame AUG as required.

[0355] In another embodiment, high-level expression of a heterologous coding sequence, such as, for example, a polynucleotide encoding an albumin fusion protein of the present invention, may be achieved by cloning the heterologous polynucleotide of the invention into an expression vector such as, for example, pGAPZ or pGAPZalpha, and growing the yeast culture in the absence of methanol.

[0356] In addition, albumin fusion proteins of the invention can be chemically synthesized using techniques known in the art (e.g., see Creighton, 1983, Proteins: Structures and Molecular Principles, W. H. Freeman & Co., N.Y., and Hunkapiller et al., Nature, 310:105-111 (1984)). For example, a polypeptide corresponding to a fragment of a polypeptide can be synthesized by use of a peptide synthesizer. Furthermore, if desired, nonclassical amino acids or chemical amino acid analogs can be introduced as a substitution or addition into the polypeptide sequence. Non-classical amino acids include, but are not limited to, to the D-isomers of the common amino acids, 2,4-diaminobutyric acid, a-amino isobutyric acid, 4-aminobutyric acid, Abu, 2-amino butyric acid, g-Abu, e-Ahx, 6-amino hexanoic acid, Aib, 2-amino isobutyric acid, 3-amino propionic acid, ornithine, norleucine, norvaline, hydroxyproline, sarcosine, citrulline, homocitrulline, cysteic acid, t-butylglycine, t-butylalanine, phenylglycine, cyclohexylalanine, b-alanine, fluoro-amino acids, designer amino acids such as b-methyl amino acids, Ca-methyl amino acids, Na-methyl amino acids, and amino acid analogs in general. Furthermore, the amino acid can be D (dextrorotary) or L (levorotary).

[0357] The invention encompasses albumin fusion proteins of the present invention which are differentially modified during or after translation, e.g., by glycosylation, acetylation, phosphorylation, amidation, derivatization by known protecting/blocking groups, proteolytic cleavage, linkage to an antibody molecule or other cellular ligand, etc. Any of numerous chemical modifications may be carried out by known techniques, including but not limited, to specific chemical cleavage by cyanogen bromide, trypsin, chymotrypsin, papain, V8 protease, NaBH₄; acetylation, formylation, oxidation, reduction; metabolic synthesis in the presence of tunicamycin; etc.

[0358] Additional post-translational modifications encompassed by the invention include, for example, e.g., N-linked or O-linked carbohydrate chains, processing of N-terminal or C-terminal ends), attachment of chemical moieties to the amino acid backbone, chemical modifications of N-linked or O-linked carbohydrate chains, and addition or deletion of an N-terminal methionine residue as a result of procaryotic host cell expression. The albumin fusion proteins may also be modified with a detectable label, such as an enzymatic, fluorescent, isotopic or affinity label to allow for detection and isolation of the protein.

[0359] Examples of suitable enzymes include horseradish peroxidase, alkaline phosphatase, beta-galactosidase, or acetylcholinesterase; examples of suitable prosthetic group complexes include streptavidin/biotin and avidin/biotin; examples of suitable fluorescent materials include umbelliferone, fluorescein, fluorescein isothiocyanate, rhodamine, dichlorotriazinylamine fluorescein, dansyl chloride or phycoerythrin; an example of a luminescent material includes luminol; examples of bioluminescent materials include luciferase, luciferin, and aequorin; and examples of suitable radioactive material include iodine (¹²¹I, ¹²³I, ¹²⁵I, ¹³¹I), carbon (¹⁴C), sulfur (³⁵S), tritium (³H), indium (¹¹¹In, ¹¹²In, ^{113m}In, ^{115m}In), technetium (⁹⁹Tc,^{99m}Tc), thallium (²⁰¹Ti), gallium (⁶⁸Ga, ⁶⁷Ga), palladium (¹⁰³Pd), molybdenum (⁹⁹Mo), xenon (¹³³Xe), fluorine (¹⁸F), ¹⁵³Sm, ¹⁷⁷Lu, ¹⁵⁹Gd, ¹⁴⁹Pm, ¹⁴⁰La, ¹⁷⁵Yb, ¹⁶⁶Ho, ⁹⁰Y, ⁴⁷Sc, ¹⁸⁶Re, ¹⁸⁸Re, ¹⁴²Pr, ¹⁰⁵Rh, and ⁹⁷Ru.

[0360] In specific embodiments, albumin fusion proteins of the present invention or fragments or variants thereof are attached to macrocyclic chelators that associate with radiometal ions, including but not limited to, ¹⁷⁷Lu, ⁹⁰Y, ¹⁶⁶Ho, and ¹⁵³Sm, to polypeptides. In a preferred embodiment, the radiometal ion associated with the macrocyclic chelators is ¹¹¹In. In another preferred embodiment, the radiometal ion associated with the macrocyclic chelator is ⁹⁰Y. In specific embodiments, the macrocyclic chelator is 1,4,7,10-tetraazacyclododecane-N,N′,N″,N′″-tetraacetic acid (DOTA). In other specific embodiments, DOTA is attached to an antibody of the invention or fragment thereof via linker molecule. Examples of linker molecules useful for conjugating DOTA to a polypeptide are commonly known in the art—see, for example, DeNardo et al., Clin Cancer Res. 4(10):2483-90 (1998); Peterson et al., Bioconjug. Chem. 10(4):553-7 (1999); and Zimmerman et al, Nucl. Med. Biol. 26(8):943-50 (1999); which are hereby incorporated by reference in their entirety.

[0361] As mentioned, the albumin fusion proteins of the invention may be modified by either natural processes, such as post-translational processing, or by chemical modification techniques which are well known in the art. It will be appreciated that the same type of modification may be present in the same or varying degrees at several sites in a given polypeptide. Polypeptides of the invention may be branched, for example, as a result of ubiquitination, and they may be cyclic, with or without branching. Cyclic, branched, and branched cyclic polypeptides may result from posttranslation natural processes or may be made by synthetic methods. Modifications include acetylation, acylation, ADP-ribosylation, amidation, covalent attachment of flavin, covalent attachment of a heme moiety, covalent attachment of a nucleotide or nucleotide derivative, covalent attachment of a lipid or lipid derivative, covalent attachment of phosphotidylinositol, cross-linking, cyclization, disulfide bond formation, demethylation, formation of covalent cross-links, formation of cysteine, formation of pyroglutamate, formylation, gamma-carboxylation, glycosylation, GPI anchor formation, hydroxylation, iodination, methylation, myristylation, oxidation, pegylation, proteolytic processing, phosphorylation, prenylation, racemization, selenoylation, sulfation, transfer-RNA mediated addition of amino acids to proteins such as arginylation, and ubiquitination. (See, for instance, PROTEINS—STRUCTURE AND MOLECULAR PROPERTIES, 2nd Ed., T. E. Creighton, W. H. Freeman and Company, New York (1993); POST-TRANSLATIONAL COVALENT MODIFICATION OF PROTEINS, B. C. Johnson, Ed., Academic Press, New York, pgs. 1-12 (1983); Seifter et al., Meth. Enzymol. 182:626-646 (1990); Rattan et al., Ann. N.Y. Acad. Sci. 663:48-62 (1992)).

[0362] Albumin fusion proteins of the invention and antibodies that bind a Therapeutic protein or fragments or variants thereof can be fused to marker sequences, such as a peptide to facilitate purification. In preferred embodiments, the marker amino acid sequence is a hexa-histidine peptide, such as the tag provided in a pQE vector (QIAGEN, Inc., 9259 Eton Avenue, Chatsworth, Calif., 91311), among others, many of which are commercially available. As described in Gentz et al., Proc. Natl. Acad. Sci. USA 86:821-824 (1989), for instance, hexa-histidine provides for convenient purification of the fusion protein. Other peptide tags useful for purification include, but are not limited to, the “HA” tag, which corresponds to an epitope derived from the influenza hemagglutinin protein (Wilson et al., Cell 37:767 (1984)) and the “flag” tag.

[0363] Further, an albumin fusion protein of the invention may be conjugated to a therapeutic moiety such as a cytotoxin, e.g., a cytostatic or cytocidal agent, a therapeutic agent or a radioactive metal ion, e.g., alpha-emitters such as, for example, 213Bi. A cytotoxin or cytotoxic agent includes any agent that is detrimental to cells. Examples include paclitaxol, cytochalasin B, gramicidin D, ethidium bromide, emetine, mitomycin, etoposide, tenoposide, vincristine, vinblastine, colchicin, doxorubicin, daunorubicin, dihydroxy anthracin dione, mitoxantrone, mithramycin, actinomycin D, 1-dehydrotestosterone, glucocorticoids, procaine, tetracaine, lidocaine, propranolol, and puromycin and analogs or homologs thereof. Therapeutic agents include, but are not limited to, antimetabolites (e.g., methotrexate, 6-mercaptopurine, 6-thioguanine, cytarabine, 5-fluorouracil decarbazine), alkylating agents (e.g., mechlorethamine, thioepa chlorambucil, melphalan, carmustine (BSNU) and lomustine (CCNU), cyclothosphamide, busulfan, dibromomannitol, streptozotocin, mitomycin C, and cis-dichlorodiamine platinum (II) (DDP) cisplatin), anthracyclines (e.g., daunorubicin (formerly daunomycin) and doxorubicin), antibiotics (e.g., dactinomycin (formerly actinomycin), bleomycin, mithramycin, and anthramycin (AMC)), and anti-mitotic agents (e.g., vincristine and vinblastine).

[0364] The conjugates of the invention can be used for modifying a given biological response, the therapeutic agent or drug moiety is not to be construed as limited to classical chemical therapeutic agents. For example, the drug moiety may be a protein or polypeptide possessing a desired biological activity. Such proteins may include, for example, a toxin such as abrin, ricin A, pseudomonas exotoxin, or diphtheria toxin; a protein such as tumor necrosis factor, alpha-interferon, β-interferon, nerve growth factor, platelet derived growth factor, tissue plasminogen activator, an apoptotic agent, e.g., TNF-alpha, TNF-beta, AIM I (See, International Publication No. WO 97/33899), AIM II (See, International Publication No. WO 97/34911), Fas Ligand (Takahashi et al, Int. Immunol., 6:1567-1574 (1994)), VEGI (See, International Publication No. WO 99/23105), a thrombotic agent or an anti-angiogenic agent, e.g., angiostatin or endostatin; or, biological response modifiers such as, for example, lymphokines, interleukin-1 (“IL-1”), interleukin-2 (“IL-2”), interleukin-6 (“IL-6”), granulocyte macrophage colony stimulating factor (“GM-CSF”), granulocyte colony stimulating factor (“G-CSF”), or other growth factors. Techniques for conjugating such therapeutic moiety to proteins (e.g., albumin fusion proteins) are well known in the art.

[0365] Albumin fusion proteins may also be attached to solid supports, which are particularly useful for immunoassays or purification of polypeptides that are bound by, that bind to, or associate with albumin fusion proteins of the invention. Such solid supports include, but are not limited to, glass, cellulose, polyacrylamide, nylon, polystyrene, polyvinyl chloride or polypropylene.

[0366] Albumin fusion proteins, with or without a therapeutic moiety conjugated to it, administered alone or in combination with cytotoxic factor(s) and/or cytokine(s) can be used as a therapeutic.

[0367] In embodiments where the albumin fusion protein of the invention comprises only the VH domain of an antibody that binds a Therapeutic protein, it may be necessary and/or desirable to coexpress the fusion protein with the VL domain of the same antibody that binds a Therapeutic protein, such that the VH-albumin fusion protein and VL protein will associate (either covalently or non-covalently) post-translationally.

[0368] In embodiments where the albumin fusion protein of the invention comprises only the VL domain of an antibody that binds a Therapeutic protein, it may be necessary and/or desirable to coexpress the fusion protein with the VH domain of the same antibody that binds a Therapeutic protein, such that the VL-albumin fusion protein and VH protein will associate (either covalently or non-covalently) post-translationally.

[0369] Some Therapeutic antibodies are bispecific antibodies, meaning the antibody that binds a Therapeutic protein is an artificial hybrid antibody having two different heavy/light chain pairs and two different binding sites. In order to create an albumin fusion protein corresponding to that Therapeutic protein, it is possible to create an albumin fusion protein which has an scFv fragment fused to both the N- and C-terminus of the albumin protein moiety. More particularly, the scFv fused to the N-terminus of albumin would correspond to one of the heavy/light (VH/VL) pairs of the original antibody that binds a Therapeutic protein and the scFv fused to the C-terminus of albumin would correspond to the other heavy/light (VH/VL) pair of the original antibody that binds a Therapeutic protein.

[0370] Also provided by the invention are chemically modified derivatives of the albumin fusion proteins of the invention which may provide additional advantages such as increased solubility, stability and circulating time of the polypeptide, or decreased immunogenicity (see U.S. Pat. No. 4,179,337). The chemical moieties for derivitization may be selected from water soluble polymers such as polyethylene glycol, ethylene glycol/propylene glycol copolymers, carboxymethylcellulose, dextran, polyvinyl alcohol and the like. The albumin fusion proteins may be modified at random positions within the molecule, or at predetermined positions within the molecule and may include one, two, three or more attached chemical moieties.

[0371] The polymer may be of any molecular weight, and may be branched or unbranched. For polyethylene glycol, the preferred molecular weight is between about 1 kDa and about 100 kDa (the term “about” indicating that in preparations of polyethylene glycol, some molecules will weigh more, some less, than the stated molecular weight) for ease in handling and manufacturing. Other sizes may be used, depending on the desired therapeutic profile (e.g., the duration of sustained release desired, the effects, if any on biological activity, the ease in handling, the degree or lack of antigenicity and other known effects of the polyethylene glycol to a Therapeutic protein or analog). For example, the polyethylene glycol may have an average molecular weight of about 200, 500, 1000, 1500, 2000, 2500, 3000, 3500, 4000, 4500, 5000, 5500, 6000, 6500, 7000, 7500, 8000, 8500, 9000, 9500, 10,000, 10,500, 11,000, 11,500, 12,000, 12,500, 13,000, 13,500, 14,000, 14,500, 15,000, 15,500, 16,000, 16,500, 17,000, 17,500, 18,000, 18,500, 19,000, 19,500, 20,000, 25,000, 30,000, 35,000, 40,000, 45,000, 50,000, 55,000, 60,000, 65,000, 70,000, 75,000, 80,000, 85,000, 90,000, 95,000, or 100,000 kDa.

[0372] As noted above, the polyethylene glycol may have a branched structure. Branched polyethylene glycols are described, for example, in U.S. Pat. No. 5,643,575; Morpurgo et al., Appl. Biochem. Biotechnol. 56:59-72 (1996); Vorobjev et al., Nucleosides Nucleotides 18:2745-2750 (1999); and Caliceti et al., Bioconjug. Chem. 10:638-646 (1999), the disclosures of each of which are incorporated herein by reference.

[0373] The polyethylene glycol molecules (or other chemical moieties) should be attached to the protein with consideration of effects on functional or antigenic domains of the protein. There are a number of attachment methods available to those skilled in the art, such as, for example, the method disclosed in EP 0 401 384 (coupling PEG to G-CSF), herein incorporated by reference; see also Malik et al., Exp. Hematol. 20:1028-1035 (1992), reporting pegylation of GM-CSF using tresyl chloride. For example, polyethylene glycol may be covalently bound through amino acid residues via reactive group, such as a free amino or carboxyl group. Reactive groups are those to which an activated polyethylene glycol molecule may be bound. The amino acid residues having a free amino group may include lysine residues and the N-terminal amino acid residues; those having a free carboxyl group may include aspartic acid residues glutamic acid residues and the C-terminal amino acid residue. Sulfhydryl groups may also be used as a reactive group for attaching the polyethylene glycol molecules. Preferred for therapeutic purposes is attachment at an amino group, such as attachment at the N-terminus or lysine group.

[0374] As suggested above, polyethylene glycol may be attached to proteins via linkage to any of a number of amino acid residues. For example, polyethylene glycol can be linked to proteins via covalent bonds to lysine, histidine, aspartic acid, glutamic acid, or cysteine residues. One or more reaction chemistries may be employed to attach polyethylene glycol to specific amino acid residues (e.g., lysine, histidine, aspartic acid, glutamic acid, or cysteine) of the protein or to more than one type of amino acid residue (e.g., lysine, histidine, aspartic acid, glutamic acid, cysteine and combinations thereof) of the protein.

[0375] One may specifically desire proteins chemically modified at the N-terminus. Using polyethylene glycol as an illustration of the present composition, one may select from a variety of polyethylene glycol molecules (by molecular weight, branching, etc.), the proportion of polyethylene glycol molecules to protein (polypeptide) molecules in the reaction mix, the type of pegylation reaction to be performed, and the method of obtaining the selected N-terminally pegylated protein. The method of obtaining the N-terminally pegylated preparation (i.e., separating this moiety from other monopegylated moieties if necessary) may be by purification of the N-terminally pegylated material from a population of pegylated protein molecules. Selective proteins chemically modified at the N-terminus modification may be accomplished by reductive alkylation which exploits differential reactivity of different types of primary amino groups (lysine versus the N-terminal) available for derivatization in a particular protein. Under the appropriate reaction conditions, substantially selective derivatization of the protein at the N-terminus with a carbonyl group containing polymer is achieved.

[0376] As indicated above, pegylation of the albumin fusion proteins of the invention may be accomplished by any number of means. For example, polyethylene glycol may be attached to the albumin fusion protein either directly or by an intervening linker. Linkerless systems for attaching polyethylene glycol to proteins are described in Delgado et al., Crit. Rev. Thera. Drug Carrier Sys. 9:249-304 (1992); Francis et al., Intern. J. of Hematol. 68:1-18 (1998); U.S. Pat. No. 4,002,531; U.S. Pat. No. 5,349,052; WO 95/06058; and WO 98/32466, the disclosures of each of which are incorporated herein by reference.

[0377] One system for attaching polyethylene glycol directly to amino acid residues of proteins without an intervening linker employs tresylated MPEG, which is produced by the modification of monmethoxy polyethylene glycol (MPEG) using tresylchloride (ClSO₂CH₂CF₃). Upon reaction of protein with tresylated MPEG, polyethylene glycol is directly attached to amine groups of the protein. Thus, the invention includes protein-polyethylene glycol conjugates produced by reacting proteins of the invention with a polyethylene glycol molecule having a 2,2,2-trifluoreothane sulphonyl group.

[0378] Polyethylene glycol can also be attached to proteins using a number of different intervening linkers. For example, U.S. Pat. No. 5,612,460, the entire disclosure of which is incorporated herein by reference, discloses urethane linkers for connecting polyethylene glycol to proteins. Protein-polyethylene glycol conjugates wherein the polyethylene glycol is attached to the protein by a linker can also be produced by reaction of proteins with compounds such as MPEG-succinimidylsuccinate, MPEG activated with 1,1′-carbonyldiimidazole, MPEG-2,4,5-trichloropenylcarbonate, MPEG-p-nitrophenolcarbonate, and various MPEG-succinate derivatives. A number of additional polyethylene glycol derivatives and reaction chemistries for attaching polyethylene glycol to proteins are described in International Publication No. WO 98/32466, the entire disclosure of which is incorporated herein by reference. Pegylated protein products produced using the reaction chemistries set out herein are included within the scope of the invention.

[0379] The number of polyethylene glycol moieties attached to each albumin fusion protein of the invention (i.e., the degree of substitution) may also vary. For example, the pegylated proteins of the invention may be linked, on average, to 1, 2, 3, 4, 5, 6, 7, 8, 9, 10, 12, 15, 17, 20, or more polyethylene glycol molecules. Similarly, the average degree of substitution within ranges such as 1-3, 2-4, 3-5, 4-6, 5-7, 6-8, 7-9, 8-10, 9-11, 10-12, 11-13, 12-14, 13-15, 14-16, 15-17, 16-18, 17-19, or 18-20 polyethylene glycol moieties per protein molecule. Methods for determining the degree of substitution are discussed, for example, in Delgado et al., Crit. Rev. Thera. Drug Carrier Sys. 9:249-304 (1992).

[0380] The polypeptides of the invention can be recovered and purified from chemical synthesis and recombinant cell cultures by standard methods which include, but are not limited to, ammonium sulfate or ethanol precipitation, acid extraction, anion or cation exchange chromatography, phosphocellulose chromatography, hydrophobic interaction chromatography, affinity chromatography, hydroxylapatite chromatography and lectin chromatography. Most preferably, high performance liquid chromatography (“HPLC”) is employed for purification. Well known techniques for refolding protein may be employed to regenerate active conformation when the polypeptide is denatured during isolation and/or purification.

[0381] The presence and quantity of albumin fusion proteins of the invention may be determined using ELISA, a well known immunoassay known in the art. In one ELISA protocol that would be useful for detecting/quantifying albumin fusion proteins of the invention, comprises the steps of coating an ELISA plate with an anti-human serum albumin antibody, blocking the plate to prevent non-specific binding, washing the ELISA plate, adding a solution containing the albumin fusion protein of the invention (at one or more different concentrations), adding a secondary anti-Therapeutic protein specific antibody coupled to a detectable label (as described herein or otherwise known in the art), and detecting the presence of the secondary antibody. In an alternate version of this protocol, the ELISA plate might be coated with the anti-Therapeutic protein specific antibody and the labeled secondary reagent might be the anti-human albumin specific antibody.

[0382] Uses of the Polynucleotides

[0383] Each of the polynucleotides identified herein can be used in numerous ways as reagents. The following description should be considered exemplary and utilizes known techniques.

[0384] The polynucleotides of the present invention are useful to produce the albumin fusion proteins of the invention. As described in more detail below, polynucleotides of the invention (encoding albumin fusion proteins) may be used in recombinant DNA methods useful in genetic engineering to make cells, cell lines, or tissues that express the albumin fusion protein encoded by the polynucleotides encoding albumin fusion proteins of the invention.

[0385] Polynucleotides of the present invention are also useful in gene therapy. One goal of gene therapy is to insert a normal gene into an organism having a defective gene, in an effort to correct the genetic defect. The polynucleotides disclosed in the present invention offer a means of targeting such genetic defects in a highly accurate manner. Another goal is to insert a new gene that was not present in the host genome, thereby producing a new trait in the host cell. Additional non-limiting examples of gene therapy methods encompassed by the present invention are more thoroughly described elsewhere herein (see, e.g., the sections labeled “Gene Therapy”, and Examples 17 and 18).

[0386] Uses of the Polypeptides

[0387] Each of the polypeptides identified herein can be used in numerous ways. The following description should be considered exemplary and utilizes known techniques.

[0388] Albumin fusion proteins of the invention are useful to provide immunological probes for differential identification of the tissue(s) (e.g., immunohistochemistry assays such as, for example, ABC immunoperoxidase (Hsu et al., J. Histochem. Cytochem. 29:577-580 (1981)) or cell type(s) (e.g., immunocytochemistry assays).

[0389] Albumin fusion proteins can be used to assay levels of polypeptides in a biological sample using classical immunohistological methods known to those of skill in the art (e.g., see Jalkanen, et al., J. Cell. Biol. 101:976-985 (1985); Jalkanen, et al., J. Cell. Biol. 105:3087-3096 (1987)). Other methods useful for detecting protein gene expression include immunoassays, such as the enzyme linked immunosorbent assay (ELISA) and the radioimmunoassay (RIA). Suitable assay labels are known in the art and include enzyme labels, such as, glucose oxidase; radioisotopes, such as iodine (¹³¹I, ¹²⁵I, ¹²³I, ¹²¹I), carbon (¹⁴C), sulfur (³⁵S), tritium (³H), indium (^{115m}In, ^{113m}In, ¹¹²In, ¹¹¹In), and technetium (⁹⁹Tc, ^{99m}Tc), thallium (²⁰¹Ti), gallium (⁶⁸Ga, ⁶⁷Ga), palladium (¹⁰³Pd), molybdenum (⁹⁹Mo), xenon (¹³³Xe), fluorine (¹⁸F), ¹⁵³Sm, ¹⁷⁷Lu, ¹⁵⁹Gd, ¹⁴⁹Pm, ¹⁴⁰La, ¹⁷⁵Yb, ¹⁶⁶Ho, ⁹⁰Y, ⁴⁷Sc, ¹⁸⁶Re, ¹⁸⁸Re, ¹⁴²Pr, ¹⁰⁵Rh, ⁹⁷Ru; luminescent labels, such as luminol; and fluorescent labels, such as fluorescein and rhodamine, and biotin.

[0390] Albumin fusion proteins of the invention can also be detected in vivo by imaging. Labels or markers for in vivo imaging of protein include those detectable by X-radiography, nuclear magnetic resonance (NMR) or electron spin relaxtion (ESR). For X-radiography, suitable labels include radioisotopes such as barium or cesium, which emit detectable radiation but are not overtly harmful to the subject. Suitable markers for NMR and ESR include those with a detectable characteristic spin, such as deuterium, which may be incorporated into the albumin fusion protein by labeling of nutrients given to a cell line expressing the albumin fusion protein of the invention.

[0391] An albumin fusion protein which has been labeled with an appropriate detectable imaging moiety, such as a radioisotope (for example, ¹³¹I, ¹¹²In, ^{99m}Tc, (¹³¹I, ¹²⁵I, ¹²³I, ¹²¹I), carbon (¹⁴C), sulfur (³⁵S), tritium (³H), indium (^{115m}In, ^{113m}In, ¹¹²In, ¹¹¹In), and technetium (⁹⁹Tc, ^{99m}Tc), thallium (²⁰¹Ti), gallium (⁶⁸Ga, ⁶⁷Ga), palladium (¹⁰³Pd), molybdenum (⁹⁹Mo), xenon (¹³³Xe), fluorine (¹⁸F, ¹⁵³Sm, ¹⁷⁷Lu, ¹⁵⁹Gd, ¹⁴⁹Pm, ¹⁴⁰La, ¹⁷⁵Yb, ¹⁶⁶Ho, ⁹⁰Y, ⁴⁷Sc, ¹⁸⁶Re, ¹⁸⁸Re, ¹⁴²Pr, ¹⁰⁵Rh, ⁹⁷Ru), a radio-opaque substance, or a material detectable by nuclear magnetic resonance, is introduced (for example, parenterally, subcutaneously or intraperitoneally) into the mammal to be examined for immune system disorder. It will be understood in the art that the size of the subject and the imaging system used will determine the quantity of imaging moiety needed to produce diagnostic images. In the case of a radioisotope moiety, for a human subject, the quantity of radioactivity injected will normally range from about 5 to 20 millicuries of ^{99m}Tc. The labeled albumin fusion protein will then preferentially accumulate at locations in the body (e.g., organs, cells, extracellular spaces or matrices) where one or more receptors, ligands or substrates (corresponding to that of the Therapeutic protein used to make the albumin fusion protein of the invention) are located. Alternatively, in the case where the albumin fusion protein comprises at least a fragment or variant of a Therapeutic antibody, the labeled albumin fusion protein will then preferentially accumulate at the locations in the body (e.g., organs, cells, extracellular spaces or matrices) where the polypeptides/epitopes corresponding to those bound by the Therapeutic antibody (used to make the albumin fusion protein of the invention) are located. In vivo tumor imaging is described in S. W. Burchiel et al., “Immunopharmacokinetics of Radiolabeled Antibodies and Their Fragments” (Chapter 13 in Tumor Imaging: The Radiochemical Detection of Cancer, S. W. Burchiel and B. A. Rhodes, eds., Masson Publishing Inc. (1982)). The protocols described therein could easily be modified by one of skill in the art for use with the albumin fusion proteins of the invention.

[0392] In one embodiment, the invention provides a method for the specific delivery of albumin fusion proteins of the invention to cells by administering albumin fusion proteins of the invention (e.g., polypeptides encoded by polynucleotides encoding albumin fusion proteins of the invention and/or antibodies) that are associated with heterologous polypeptides or nucleic acids. In one example, the invention provides a method for delivering a Therapeutic protein into the targeted cell. In another example, the invention provides a method for delivering a single stranded nucleic acid (e.g., antisense or ribozymes) or double stranded nucleic acid (e.g., DNA that can integrate into the cell's genome or replicate episomally and that can be transcribed) into the targeted cell.

[0393] In another embodiment, the invention provides a method for the specific destruction of cells (e.g., the destruction of tumor cells) by administering albumin fusion proteins of the invention in association with toxins or cytotoxic prodrugs.

[0394] By “toxin” is meant one or more compounds that bind and activate endogenous cytotoxic effector systems, radioisotopes, holotoxins, modified toxins, catalytic subunits of toxins, or any molecules or enzymes not normally present in or on the surface of a cell that under defined conditions cause the cell's death. Toxins that may be used according to the methods of the invention include, but are not limited to, radioisotopes known in the art, compounds such as, for example, antibodies (or complement fixing containing portions thereof) that bind an inherent or induced endogenous cytotoxic effector system, thymidine kinase, endonuclease, RNAse, alpha toxin, ricin, abrin, Pseudomonas exotoxin A, diphtheria toxin, saporin, momordin, gelonin, pokeweed antiviral protein, alpha-sarcin and cholera toxin. “Toxin” also includes a cytostatic or cytocidal agent, a therapeutic agent or a radioactive metal ion, e.g., alpha-emitters such as, for example, ²¹³Bi, or other radioisotopes such as, for example, ¹⁰³Pd, ¹³³Xe, ¹³¹I, ⁶⁸Ge, ⁵⁷Co, ⁶⁵Zn, ⁸⁵Sr, ³²P, ³⁵S, ⁹⁰Y, ¹⁵³Sm, ¹⁵³Gd, ¹⁶⁹Yb, ⁵¹Cr, ⁵⁴Mn, ⁷⁵Se, ¹¹³Sn, ⁹⁰Yttrium, ¹¹⁷Tin, ¹⁸⁶Rhenium, ¹⁶⁶Holmium, and ¹⁸⁸Rhenium; luminescent labels, such as luminol; and fluorescent labels, such as fluorescein and rhodamine, and biotin. In a specific embodiment, the invention provides a method for the specific destruction of cells (e.g., the destruction of tumor cells) by administering polypeptides of the invention or antibodies of the invention in association with the radioisotope ⁹⁰Y. In another specific embodiment, the invention provides a method for the specific destruction of cells (e.g., the destruction of tumor cells) by administering polypeptides of the invention or antibodies of the invention in association with the radioisotope ¹¹¹In. In a further specific embodiment, the invention provides a method for the specific destruction of cells (e.g., the destruction of tumor cells) by administering polypeptides of the invention or antibodies of the invention in association with the radioisotope ¹³¹I.

[0395] Techniques known in the art may be applied to label polypeptides of the invention. Such techniques include, but are not limited to, the use of bifunctional conjugating agents (see e.g., U.S. Pat. Nos. 5,756,065; 5,714,631; 5,696,239; 5,652,361; 5,505,931; 5,489,425; 5,435,990; 5,428,139; 5,342,604; 5,274,119; 4,994,560; and 5,808,003; the contents of each of which are hereby incorporated by reference in its entirety).

[0396] The albumin fusion proteins of the present invention are useful for diagnosis, treatment, prevention and/or prognosis of various disorders in mammals, preferably humans. Such disorders include, but are not limited to, those described herein under the section heading “Biological Activities,” below.

[0397] Thus, the invention provides a diagnostic method of a disorder, which involves (a) assaying the expression level of a certain polypeptide in cells or body fluid of an individual using an albumin fusion protein of the invention; and (b) comparing the assayed polypeptide expression level with a standard polypeptide expression level, whereby an increase or decrease in the assayed polypeptide expression level compared to the standard expression level is indicative of a disorder. With respect to cancer, the presence of a relatively high amount of transcript in biopsied tissue from an individual may indicate a predisposition for the development of the disease, or may provide a means for detecting the disease prior to the appearance of actual clinical symptoms. A more definitive diagnosis of this type may allow health professionals to employ preventative measures or aggressive treatment earlier thereby preventing the development or further progression of the cancer.

[0398] Moreover, albumin fusion proteins of the present invention can be used to treat or prevent diseases or conditions such as, for example, neural disorders, immune system disorders, muscular disorders, reproductive disorders, gastrointestinal disorders, pulmonary disorders, cardiovascular disorders, renal disorders, proliferative disorders, and/or cancerous diseases and conditions. For example, patients can be administered a polypeptide of the present invention in an effort to replace absent or decreased levels of the polypeptide (e.g., insulin), to supplement absent or decreased levels of a different polypeptide (e.g., hemoglobin S for hemoglobin B, SOD, catalase, DNA repair proteins), to inhibit the activity of a polypeptide (e.g., an oncogene or tumor supressor), to activate the activity of a polypeptide (e.g., by binding to a receptor), to reduce the activity of a membrane bound receptor by competing with it for free ligand (e.g., soluble TNF receptors used in reducing inflammation), or to bring about a desired response (e.g., blood vessel growth inhibition, enhancement of the immune response to proliferative cells or tissues).

[0399] In particular, albumin fusion proteins comprising of at least a fragment or variant of a Therapeutic antibody can also be used to treat disease (as described supra, and elsewhere herein). For example, administration of an albumin fusion protein comprising of at least a fragment or variant of a Therapeutic antibody can bind, and/or neutralize the polypeptide to which the Therapeutic antibody used to make the albumin fusion protein specifically binds, and/or reduce overproduction of the polypeptide to which the Therapeutic antibody used to make the albumin fusion protein specifically binds. Similarly, administration of an albumin fusion protein comprising of at least a fragment or variant of a Therapeutic antibody can activate the polypeptide to which the Therapeutic antibody used to make the albumin fusion protein specifically binds, by binding to the polypeptide bound to a membrane (receptor).

[0400] At the very least, the albumin fusion proteins of the invention of the present invention can be used as molecular weight markers on SDS-PAGE gels or on molecular sieve gel filtration columns using methods well known to those of skill in the art. Albumin fusion proteins of the invention can also be used to raise antibodies, which in turn may be used to measure protein expression of the Therapeutic protein, albumin protein, and/or the albumin fusion protein of the invention from a recombinant cell, as a way of assessing transformation of the host cell, or in a biological sample. Moreover, the albumin fusion proteins of the present invention can be used to test the biological activities described herein.

[0401] Diagnostic Assays

[0402] The compounds of the present invention are useful for diagnosis, treatment, prevention and/or prognosis of various disorders in mammals, preferably humans. Such disorders include, but are not limited to, those described for each Therapeutic protein in the corresponding row of Table 1 and herein under the section headings “Immune Activity,” “Blood Related Disorders,” “Hyperproliferative Disorders,” “Renal Disorders,” “Cardiovascular Disorders,” “Respiratory Disorders,” “Anti-Angiogenesis Activity,” “Diseases at the Cellular Level,” “Wound Healing and Epithelial Cell Proliferation,” “Neural Activity and Neurological Diseases,” “Endocrine Disorders,” “Reproductive System Disorders,” “Infectious Disease,” “Regeneration,” and/or “Gastrointestinal Disorders,” infra.

[0403] For a number of disorders, substantially altered (increased or decreased) levels of gene expression can be detected in tissues, cells or bodily fluids (e.g., sera, plasma, urine, semen, synovial fluid or spinal fluid) taken from an individual having such a disorder, relative to a “standard” gene expression level, that is, the expression level in tissues or bodily fluids from an individual not having the disorder. Thus, the invention provides a diagnostic method useful during diagnosis of a disorder, which involves measuring the expression level of the gene encoding a polypeptide in tissues, cells or body fluid from an individual and comparing the measured gene expression level with a standard gene expression level, whereby an increase or decrease in the gene expression level(s) compared to the standard is indicative of a disorder. These diagnostic assays may be performed in vivo or in vitro, such as, for example, on blood samples, biopsy tissue or autopsy tissue.

[0404] The present invention is also useful as a prognostic indicator, whereby patients exhibiting enhanced or depressed gene expression will experience a worse clinical outcome By “assaying the expression level of the gene encoding a polypeptide” is intended qualitatively or quantitatively measuring or estimating the level of a particular polypeptide (e.g. a polypeptide corresponding to a Therapeutic protein disclosed in Table 1) or the level of the mRNA encoding the polypeptide of the invention in a first biological sample either directly (e.g., by determining or estimating absolute protein level or mRNA level) or relatively (e.g., by comparing to the polypeptide level or mRNA level in a second biological sample). Preferably, the polypeptide expression level or mRNA level in the first biological sample is measured or estimated and compared to a standard polypeptide level or mRNA level, the standard being taken from a second biological sample obtained from an individual not having the disorder or being determined by averaging levels from a population of individuals not having the disorder. As will be appreciated in the art, once a standard polypeptide level or mRNA level is known, it can be used repeatedly as a standard for comparison.

[0405] By “biological sample” is intended any biological sample obtained from an individual, cell line, tissue culture, or other source containing polypeptides of the invention (including portions thereof) or mRNA. As indicated, biological samples include body fluids (such as sera, plasma, urine, synovial fluid and spinal fluid) and tissue sources found to express the full length or fragments thereof of a polypeptide or mRNA. Methods for obtaining tissue biopsies and body fluids from mammals are well known in the art. Where the biological sample is to include mRNA, a tissue biopsy is the preferred source.

[0406] Total cellular RNA can be isolated from a biological sample using any suitable technique such as the single-step guanidinium-thiocyanate-phenol-chloroform method described in Chomczynski and Sacchi, Anal. Biochem. 162:156-159 (1987). Levels of mRNA encoding the polypeptides of the invention are then assayed using any appropriate method. These include Northern blot analysis, S1 nuclease mapping, the polymerase chain reaction (PCR), reverse transcription in combination with the polymerase chain reaction (RT-PCR), and reverse transcription in combination with the ligase chain reaction (RT-LCR).

[0407] The present invention also relates to diagnostic assays such as quantitative and diagnostic assays for detecting levels of polypeptides that bind to, are bound by, or associate with albumin fusion proteins of the invention, in a biological sample (e.g., cells and tissues), including determination of normal and abnormal levels of polypeptides. Thus, for instance, a diagnostic assay in accordance with the invention for detecting abnormal expression of polypeptides that bind to, are bound by, or associate with albumin fusion proteins compared to normal control tissue samples may be used to detect the presence of tumors. Assay techniques that can be used to determine levels of a polypeptide that bind to, are bound by, or associate with albumin fusion proteins of the present invention in a sample derived from a host are well-known to those of skill in the art. Such assay methods include radioimmunoassays, competitive-binding assays, Western Blot analysis and ELISA assays. Assaying polypeptide levels in a biological sample can occur using any art-known method.

[0408] Assaying polypeptide levels in a biological sample can occur using a variety of techniques. For example, polypeptide expression in tissues can be studied with classical immunohistological methods (Jalkanen et al., J. Cell. Biol. 101:976-985 (1985); Jalkanen, M., et al., J. Cell. Biol. 105:3087-3096 (1987)). Other methods useful for detecting polypeptide gene expression include immunoassays, such as the enzyme linked immunosorbent assay (ELISA) and the radioimmunoassay (RIA). Suitable antibody assay labels are known in the art and include enzyme labels, such as, glucose oxidase, and radioisotopes, such as iodine (¹²⁵I, ¹²¹I), carbon (¹⁴C), sulfur (³⁵S), tritium (³H), indium (¹¹²In), and technetium (^{99m}Tc), and fluorescent labels, such as fluorescein and rhodamine, and biotin.

[0409] The tissue or cell type to be analyzed will generally include those which are known, or suspected, to express the gene of interest (such as, for example, cancer). The protein isolation methods employed herein may, for example, be such as those described in Harlow and Lane (Harlow, E. and Lane, D., 1988, “Antibodies: A Laboratory Manual”, Cold Spring Harbor Laboratory Press, Cold Spring Harbor, N.Y.), which is incorporated herein by reference in its entirety. The isolated cells can be derived from cell culture or from a patient. The analysis of cells taken from culture may be a necessary step in the assessment of cells that could be used as part of a cell-based gene therapy technique or, alternatively, to test the effect of compounds on the expression of the gene.

[0410] For example, albumin fusion proteins may be used to quantitatively or qualitatively detect the presence of polypeptides that bind to, are bound by, or associate with albumin fusion proteins of the present invention. This can be accomplished, for example, by immunofluorescence techniques employing a fluorescently labeled albumin fusion protein coupled with light microscopic, flow cytometric, or fluorimetric detection.

[0411] In a preferred embodiment, albumin fusion proteins comprising at least a fragment or variant of an antibody that specifically binds at least a Therapeutic protein disclosed herein (e.g., the Therapeutic proteins disclosed in Table 1) or otherwise known in the art may be used to quantitatively or qualitatively detect the presence of gene products or conserved variants or peptide fragments thereof. This can be accomplished, for example, by immunofluorescence techniques employing a fluorescently labeled antibody coupled with light microscopic, flow cytometric, or fluorimetric detection.

[0412] The albumin fusion proteins of the present invention may, additionally, be employed histologically, as in immunofluorescence, immunoelectron microscopy or non-immunological assays, for in situ detection of polypeptides that bind to, are bound by, or associate with an albumin fusion protein of the present invention. In situ detection may be accomplished by removing a histological specimen from a patient, and applying thereto a labeled antibody or polypeptide of the present invention. The albumin fusion proteins are preferably applied by overlaying the labeled albumin fusion proteins onto a biological sample. Through the use of such a procedure, it is possible to determine not only the presence of the polypeptides that bind to, are bound by, or associate with albumin fusion proteins, but also its distribution in the examined tissue. Using the present invention, those of ordinary skill will readily perceive that any of a wide variety of histological methods (such as staining procedures) can be modified in order to achieve such in situ detection.

[0413] Immunoassays and non-immunoassays that detect polypeptides that bind to, are bound by, or associate with albumin fusion proteins will typically comprise incubating a sample, such as a biological fluid, a tissue extract, freshly harvested cells, or lysates of cells which have been incubated in cell culture, in the presence of a detectably labeled antibody capable of binding gene products or conserved variants or peptide fragments thereof, and detecting the bound antibody by any of a number of techniques well-known in the art.

[0414] The biological sample may be brought in contact with and immobilized onto a solid phase support or carrier such as nitrocellulose, or other solid support which is capable of immobilizing cells, cell particles or soluble proteins. The support may then be washed with suitable buffers followed by treatment with the detectably labeled albumin fusion protein of the invention. The solid phase support may then be washed with the buffer a second time to remove unbound antibody or polypeptide. Optionally the antibody is subsequently labeled. The amount of bound label on solid support may then be detected by conventional means.

[0415] By “solid phase support or carrier” is intended any support capable of binding a polypeptide (e.g., an albumin fusion protein, or polypeptide that binds, is bound by, or associates with an albumin fusion protein of the invention.) Well-known supports or carriers include glass, polystyrene, polypropylene, polyethylene, dextran, nylon, amylases, natural and modified celluloses, polyacrylamides, gabbros, and magnetite. The nature of the carrier can be either soluble to some extent or insoluble for the purposes of the present invention. The support material may have virtually any possible structural configuration so long as the coupled molecule is capable of binding to a polypeptide. Thus, the support configuration may be spherical, as in a bead, or cylindrical, as in the inside surface of a test tube, or the external surface of a rod. Alternatively, the surface may be flat such as a sheet, test strip, etc. Preferred supports include polystyrene beads. Those skilled in the art will know many other suitable carriers for binding antibody or antigen, or will be able to ascertain the same by use of routine experimentation.

[0416] The binding activity of a given lot of albumin fusion protein may be determined according to well known methods. Those skilled in the art will be able to determine operative and optimal assay conditions for each determination by employing routine experimentation.

[0417] In addition to assaying polypeptide levels in a biological sample obtained from an individual, polypeptide can also be detected in vivo by imaging. For example, in one embodiment of the invention, albumin fusion proteins of the invention are used to image diseased or neoplastic cells.

[0418] Labels or markers for in vivo imaging of albumin fusion proteins of the invention include those detectable by X-radiography, NMR, MRI, CAT-scans or ESR. For X-radiography, suitable labels include radioisotopes such as barium or cesium, which emit detectable radiation but are not overtly harmful to the subject. Suitable markers for NMR and ESR include those with a detectable characteristic spin, such as deuterium, which may be incorporated into the albumin fusion protein by labeling of nutrients of a cell line (or bacterial or yeast strain) engineered.

[0419] Additionally, albumin fusion proteins of the invention whose presence can be detected, can be administered. For example, albumin fusion proteins of the invention labeled with a radio-opaque or other appropriate compound can be administered and visualized in vivo, as discussed, above for labeled antibodies. Further, such polypeptides can be utilized for in vitro diagnostic procedures.

[0420] A polypeptide-specific antibody or antibody fragment which has been labeled with an appropriate detectable imaging moiety, such as a radioisotope (for example, ¹³¹I, ¹¹²In, ^{99m}Tc), a radio-opaque substance, or a material detectable by nuclear magnetic resonance, is introduced (for example, parenterally, subcutaneously or intraperitoneally) into the mammal to be examined for a disorder. It will be understood in the art that the size of the subject and the imaging system used will determine the quantity of imaging moiety needed to produce diagnostic images. In the case of a radioisotope moiety, for a human subject, the quantity of radioactivity injected will normally range from about 5 to 20 millicuries of ^{99m}Tc. The labeled albumin fusion protein will then preferentially accumulate at the locations in the body which contain a polypeptide or other substance that binds to, is bound by or associates with an albumin fusion protein of the present invention. In vivo tumor imaging is described in S. W. Burchiel et al., “Immunopharmacokinetics of Radiolabeled Antibodies and Their Fragments” (Chapter 13 in Tumor Imaging: The Radiochemical Detection of Cancer, S. W. Burchiel and B. A. Rhodes, eds., Masson Publishing Inc. (1982)).

[0421] One of the ways in which an albumin fusion protein of the present invention can be detectably labeled is by linking the same to a reporter enzyme and using the linked product in an enzyme immunoassay (EIA) (Voller, A., “The Enzyme Linked Immunosorbent Assay (ELISA)”, 1978, Diagnostic Horizons 2:1-7, Microbiological Associates Quarterly Publication, Walkersville, Md.); Voller et al., J. Clin. Pathol. 31:507-520 (1978); Butler, J. E., Meth. Enzymol. 73:482-523 (1981); Maggio, E. (ed.), 1980, Enzyme Immunoassay, CRC Press, Boca Raton, Fla.,; Ishikawa, E. et al., (eds.), 1981, Enzyme Immunoassay, Kgaku Shoin, Tokyo). The reporter enzyme which is bound to the antibody will react with an appropriate substrate, preferably a chromogenic substrate, in such a manner as to produce a chemical moiety which can be detected, for example, by spectrophotometric, fluorimetric or by visual means. Reporter enzymes which can be used to detectably label the antibody include, but are not limited to, malate dehydrogenase, staphylococcal nuclease, delta-5-steroid isomerase, yeast alcohol dehydrogenase, alpha-glycerophosphate, dehydrogenase, triose phosphate isomerase, horseradish peroxidase, alkaline phosphatase, asparaginase, glucose oxidase, beta-galactosidase, ribonuclease, urease, catalase, glucose-6-phosphate dehydrogenase, glucoamylase and acetylcholinesterase. Additionally, the detection can be accomplished by colorimetric methods which employ a chromogenic substrate for the reporter enzyme. Detection may also be accomplished by visual comparison of the extent of enzymatic reaction of a substrate in comparison with similarly prepared standards.

[0422] Albumin fusion proteins may also be radiolabelled and used in any of a variety of other immunoassays. For example, by radioactively labeling the albumin fusion proteins, it is possible to the use the albumin fusion proteins in a radioimmunoassay (RIA) (see, for example, Weintraub, B., Principles of Radioimmunoassays, Seventh Training Course on Radioligand Assay Techniques, The Endocrine Society, March, 1986, which is incorporated by reference herein). The radioactive isotope can be detected by means including, but not limited to, a gamma counter, a scintillation counter, or autoradiography.

[0423] It is also possible to label the albumin fusion proteins with a fluorescent compound. When the fluorescently labeled antibody is exposed to light of the proper wave length, its presence can then be detected due to fluorescence. Among the most commonly used fluorescent labeling compounds are fluorescein isothiocyanate, rhodamine, phycoerythrin, phycocyanin, allophycocyanin, ophthaldehyde and fluorescamine.

[0424] The albumin fusion protein can also be detectably labeled using fluorescence emitting metals such as ¹⁵²Eu, or others of the lanthamide series. These metals can be attached to the antibody using such metal chelating groups as diethylenetriaminepentacetic acid (DTPA) or ethylenediaminetetraacetic acid (EDTA).

[0425] The albumin fusion proteins can also can be detectably labeled by coupling it to a chemiluminescent compound. The presence of the chemiluminescent-tagged albumin fusion protein is then determined by detecting the presence of luminescence that arises during the course of a chemical reaction. Examples of particularly useful chemiluminescent labeling compounds are luminol, isoluminol, theromatic acridinium ester, imidazole, acridinium salt and oxalate ester.

[0426] Likewise, a bioluminescent compound may be used to label albumin fusion proteins of the present invention. Bioluminescence is a type of chemiluminescence found in biological systems in, which a catalytic protein increases the efficiency of the chemiluminescent reaction. The presence of a bioluminescent protein is determined by detecting the presence of luminescence. Important bioluminescent compounds for purposes of labeling are luciferin, luciferase and aequorin.

[0427] Transgenic Organisms

[0428] Transgenic organisms that express the albumin fusion proteins of the invention are also included in the invention. Transgenic organisms are genetically modified organisms into which recombinant, exogenous or cloned genetic material has been transferred. Such genetic material is often referred to as a transgene. The nucleic acid sequence of the transgene may include one or more transcriptional regulatory sequences and other nucleic acid sequences such as introns, that may be necessary for optimal expression and secretion of the encoded protein. The transgene may be designed to direct the expression of the encoded protein in a manner that facilitates its recovery from the organism or from a product produced by the organism, e.g. from the milk, blood, urine, eggs, hair or seeds of the organism. The transgene may consist of nucleic acid sequences derived from the genome of the same species or of a different species than the species of the target animal. The transgene may be integrated either at a locus of a genome where that particular nucleic acid sequence is not otherwise normally found or at the normal locus for the transgene.

[0429] The term “germ cell line transgenic organism” refers to a transgenic organism in which the genetic alteration or genetic information was introduced into a germ line cell, thereby conferring the ability of the transgenic organism to transfer the genetic information to offspring. If such offspring in fact possess some or all of that alteration or genetic information, then they too are transgenic organisms. The alteration or genetic information may be foreign to the species of organism to which the recipient belongs, foreign only to the particular individual recipient, or may be genetic information already possessed by the recipient. In the last case, the altered or introduced gene may be expressed differently than the native gene.

[0430] A transgenic organism may be a transgenic animal or a transgenic plant. Transgenic animals can be produced by a variety of different methods including transfection, electroporation, microinjection, gene targeting in embryonic stem cells and recombinant viral and retroviral infection (see, e.g., U.S. Pat. No. 4,736,866; U.S. Pat. No. 5,602,307; Mullins et al. (1993) Hypertension 22(4):630-633; Brenin et al. (1997) Surg. Oncol. 6(2)99-110; Tuan (ed.), Recombinant Gene Expression Protocols, Methods in Molecular Biology No. 62, Humana Press (1997)). The method of introduction of nucleic acid fragments into recombination competent mammalian cells can be by any method which favors co-transformation of multiple nucleic acid molecules. Detailed procedures for producing transgenic animals are readily available to one skilled in the art, including the disclosures in U.S. Pat. No. 5,489,743 and U.S. Pat. No. 5,602,307.

[0431] A number of recombinant or transgenic mice have been produced, including those which express an activated oncogene sequence (U.S. Pat. No. 4,736,866); express simian SV40 T-antigen (U.S. Pat. No. 5,728,915); lack the expression of interferon regulatory factor 1 (IRF-1) (U.S. Pat. No. 5,731,490); exhibit dopaminergic dysfunction (U.S. Pat. No. 5,723,719); express at least one human gene which participates in blood pressure control (U.S. Pat. No. 5,731,489); display greater similarity to the conditions existing in naturally occurring Alzheimer's disease (U.S. Pat. No. 5,720,936); have a reduced capacity to mediate cellular adhesion (U.S. Pat. No. 5,602,307); possess a bovine growth hormone gene (Clutter et al. (1996) Genetics 143(4):1753-1760); or, are capable of generating a fully human antibody response (McCarthy (1997) The Lancet 349(9049):405).

[0432] While mice and rats remain the animals of choice for most transgenic experimentation, in some instances it is preferable or even necessary to use alternative animal species. Transgenic procedures have been successfully utilized in a variety of non-murine animals, including sheep, goats, pigs, dogs, cats, monkeys, chimpanzees, hamsters, rabbits, cows and guinea pigs (see, e.g., Kim et al. (1997) Mol. Reprod. Dev. 46(4):515-526; Houdebine (1995) Reprod. Nutr. Dev. 35(6):609-617; Petters (1994) Reprod. Fertil. Dev. 6(5):643-645; Schnieke et al. (1997) Science 278(5346):2130-2133; and Amoah (1997) J. Animal Science 75(2):578-585).

[0433] To direct the secretion of the transgene-encoded protein of the invention into the milk of transgenic mammals, it may be put under the control of a promoter that is preferentially activated in mammary epithelial cells. Promoters that control the genes encoding milk proteins are preferred, for example the promoter for casein, beta lactoglobulin, whey acid protein, or lactalbumin (see, e.g., DiTullio (1992) BioTechnology 10:74-77; Clark et al. (1989) BioTechnology 7:487-492; Gorton et al. (1987) BioTechnology 5:1183-1187; and Soulier et al. (1992) FEBS Letts. 297:13). The transgenic mammals of choice would produce large volumes of milk and have long lactating periods, for example goats, cows, camels or sheep.

[0434] An albumin fusion protein of the invention can also be expressed in a transgenic plant, e.g. a plant in which the DNA transgene is inserted into the nuclear or plastidic genome. Plant transformation procedures used to introduce foreign nucleic acids into plant cells or protoplasts are known in the art (e.g., see Example 19). See, in general, Methods in Enzymology Vol. 153 (“Recombinant DNA Part D”) 1987, Wu and Grossman Eds., Academic Press and European Patent Application EP 693554. Methods for generation of genetically engineered plants are further described in U.S. Pat. No. 5,283,184, U.S. Pat. No. 5, 482,852, and European Patent Application EP 693 554, all of which are hereby incorporated by reference.

[0435] Pharmaceutical or Therapeutic Compositions

[0436] The albumin fusion proteins of the invention or formulations thereof may be administered by any conventional method including parenteral (e.g. subcutaneous or intramuscular) injection or intravenous infusion. The treatment may consist of a single dose or a plurality of doses over a period of time.

[0437] While it is possible for an albumin fusion protein of the invention to be administered alone, it is preferable to present it as a pharmaceutical formulation, together with one or more acceptable carriers. The carrier(s) must be “acceptable” in the sense of being compatible with the albumin fusion protein and not deleterious to the recipients thereof. Typically, the carriers will be water or saline which will be sterile and pyrogen free. Albumin fusion proteins of the invention are particularly well suited to formulation in aqueous carriers such as sterile pyrogen free water, saline or other isotonic solutions because of their extended shelf-life in solution. For instance, pharmaceutical compositions of the invention may be formulated well in advance in aqueous form, for instance, weeks or months or longer time periods before being dispensed.

[0438] For example, wherein the Therapeutic protein is hGH, EPO, alpha-IFN or beta-IFN, formulations containing the albumin fusion protein may be prepared taking into account the extended shelf-life of the albumin fusion protein in aqueous formulations. As exhibited in Table 2, most Therapeutic proteins are unstable with short shelf-lives after formulation with an aqueous carrier. As discussed above, the shelf-life of many of these Therapeutic proteins are markedly increased or prolonged after fusion to HA.

TABLE 2

| | | | | Storage Conditions |
|---|---|---|---|---|
| | Tradename, | | | of Non-Fusion |
| Protein | Manufacturer | Route | Formulation | Protein |
| Interferon, | Roferon-A, | sc | sol n | 4-8° C. |
| alpha-2a | Hoffmann- | im | (vial or pre-filled | |
| | LaRoche | | syringe) | |
| Interferon, | Intron-A, | iv sc | sol n; | 4-8° C. |
| alpha-2b | Schering Plough | im | powder + dil. | (all preps, before and |
| | | | | after dilution) |
| COMBO | Rebetron | po + | Rebetol capsule + | |
| Interferon | (Intron-A + | sc | Intron-A injection | |
| alpha-2b + | Rebetol) | | | |
| Ribavirin | Schering Plough | | | |
| Interferon, | Infergen | sc | sol n | 4-8° C. |
| Alphacon-1 | Amgen | | | |
| Interferon, | Wellferon, | sc | sol n | 4-8° C. |
| alpha-n1, | Wellcome | im | (with albumin as | |
| Lymphoblastoid | | | stablizer) | |
| Interferon, | Avonex, | im | powder + dil. | 4-8° C. |
| beta-1a | Biogen | | (with albumin) | (before and after |
| | | | | dilution) |
| | | | | (Use within 3-6 h of |
| | | | | reconstitution) |
| | Rebif, | sc | sol n, | |
| | Ares-Serono | | in pre-filled syringe | |
| | (Europe only) | | | |
| Interferon, | Betaseron, | sc | powder + dil. | 4-8° C. |
| beta-1b | Chiron | | (with albumin) | (before and after |
| | (Europe: | | | dilution) |
| | Betaferon) | | | (Use within 3 h of |
| | | | | reconstitution) |
| | | | | Single use vials. |
| Interferon, | Actimmune, | sc | | 4-8° C. |
| Gamma-1b | InterMune | | | (before and after |
| | Pharmaceuticals | | | dilution) |
| | | | | (Use within 3 h of |
| | | | | reconstitution). |
| Growth | Genotropin, | | powder/dil | 4-8° C. |
| Hormone | Pharmacia | | cartridges (single or | (before and after |
| (somatropin) | Upjohn | | multi-use); | dilution); |
| | | | single use | single use MiniQuick |
| | | | MiniQuick injector | Delivery Device |
| | | | | should be |
| | | | | refrigerated until use. |
| | Humatrope, | sc | powder + dil. | 4-8° C. |
| | Eli Lilly | im | (Vial or pen | (before and after |
| | | | cartridge) | dilution) |
| | | | | (Use vials within |
| | | | | 25 h, cartridges |
| | | | | within 28 d, of |
| | | | | reconstitution). |
| | Norditropin, | | | |
| | Novo Nordisk | | | |
| | Pharmaceuticals | | | |
| | Nutropin, | sc | powder + dil. | 4-8° C. |
| | Genentech | | | (stable for 14 d after |
| | | | | dil n) |
| | | | | (all preps, before and |
| | | | | after dilution) |
| | Nutropin AQ, | sc | sol n | 4-8° C. |
| | Genentech | | | (Stable for 28 d after |
| | | | | 1st use) |
| | Nutropin Depot, | sc | microsphere | 4-8° C. |
| | Genentech | | suspension as | Single use pkges. |
| | | | powder + dil. | Dose 1-2x/month |
| | | | | (ProLease micro- |
| | | | | encapsulation |
| | | | | technol.) |
| | Saizen, | sc | powder + dil. | Powder should be |
| | (Serono) | im | | stored at Rm |
| | | | | Temp. After |
| | | | | reconstitution store |
| | | | | 4-8° C. for up to 14 d. |
| | Serostim, | | | Powder should be |
| | Serono | | | stored at Rm |
| | | | | Temp. After |
| | | | | reconstitution store |
| | | | | in 4-8° C. for up to |
| | | | | 14 d. |
| hGH, with | Protropin, | sc | powder + dil. | 4-8° C. |
| N-term. Met | Genentech | im | | (all preps, before |
| (somatrem) | | | | and after dilution) |
| Erythropoietin | Epogen, | iv | sol n | 4-8° C. |
| (Epoetin alfa) | Amgen | sc | | (use within 21 d of |
| | | | | first use) |
| | | | | (Single & multi-dose |
| | | | | vials) |
| | Procrit, | iv | sol n | 4-8° C. |
| | Amgen | sc | | (use within 21 d of |
| | | | | first use) |
| | | | | (Single & multi-dose |
| | | | | vials) |

[0439] In instances where aerosol administration is appropriate, the albumin fusion proteins of the invention can be formulated as aerosols using standard procedures. The term “aerosol” includes any gas-borne suspended phase of an albumin fusion protein of the instant invention which is capable of being inhaled into the bronchioles or nasal passages. Specifically, aerosol includes a gas-borne suspension of droplets of an albumin fusion protein of the instant invention, as may be produced in a metered dose inhaler or nebulizer, or in a mist sprayer. Aerosol also includes a dry powder composition of a compound of the instant invention suspended in air or other carrier gas, which may be delivered by insufflation from an inhaler device, for example. See Ganderton & Jones, Drug Delivery to the Respiratory Tract, Ellis Horwood (19 87); Gonda (1990) Critical Reviews in Therapeutic Drug Carrier Systems 6:273-313; and Raeburn et al, (1992) Pharmacol. Toxicol. Methods 27:143-159.

[0440] The formulations of the invention are also typically non-immunogenic, in part, because of the use of the components of the albumin fusion protein being derived from the proper species. For instance, for human use, both the Therapeutic protein and albumin portions of the albumin fusion protein will typically be human. In some cases, wherein either component is non human-derived, that component may be humanized by substitution of key amino acids so that specific epitopes appear to the human immune system to be human in nature rather than foreign.

[0441] The formulations may conveniently be presented in unit dosage form and may be prepared by any of the methods well known in the art of pharmacy. Such methods include the step of bringing into association the albumin fusion protein with the carrier that constitutes one or more accessory ingredients. In general the formulations are prepared by uniformly and intimately bringing into association the active ingredient with liquid carriers or finely divided solid carriers or both, and then, if necessary, shaping the product.

[0442] Formulations suitable for parenteral administration include aqueous and non-aqueous sterile injection solutions which may contain anti-oxidants, buffers, bacteriostats and solutes which render the formulation appropriate for the intended recipient; and aqueous and non-aqueous sterile suspensions which may include suspending agents and thickening agents. The formulations may be presented in unit-dose or multi-dose containers, for example sealed ampules, vials or syringes, and may be stored in a freeze-dried (lyophilised) condition requiring only the addition of the sterile liquid carrier, for example water for injections, immediately prior to use. Extemporaneous injection solutions and suspensions may be prepared from sterile powders. Dosage formulations may contain the Therapeutic protein portion at a lower molar concentration or lower dosage compared to the non-fused standard formulation for the Therapeutic protein given the extended serum half-life exhibited by many of the albumin fusion proteins of the invention.

[0443] As an example, when an albumin fusion protein of the invention comprises growth hormone as one or more of the Therapeutic protein regions, the dosage form can be calculated on the basis of the potency of the albumin fusion protein relative to the potency of hGH, while taking into account the prolonged serum half-life and shelf-life of the albumin fusion proteins compared to that of native hGH. Growth hormone is typically administered at 0.3 to 30.0 IU/kg/week, for example 0.9 to 12.0 IU/kg/week, given in three or seven divided doses for a year or more. In an albumin fusion protein consisting of full length HA fused to full length GH, an equivalent dose in terms of units would represent a greater weight of agent but the dosage frequency can be reduced, for example to twice a week, once a week or less.

[0444] Formulations or compositions of the invention may be packaged together with, or included in a kit with, instructions or a package insert referring to the extended shelf-life of the albumin fusion protein component. For instance, such instructions or package inserts may address recommended storage conditions, such as time, temperature and light, taking into account the extended or prolonged shelf-life of the albumin fusion proteins of the invention. Such instructions or package inserts may also address the particular advantages of the albumin fusion proteins of the inventions, such as the ease of storage for formulations that may require use in the field, outside of controlled hospital, clinic or office conditions. As described above, formulations of the invention may be in aqueous form and may be stored under less than ideal circumstances without significant loss of therapeutic activity.

[0445] Albumin fusion proteins of the invention can also be included in nutraceuticals. For instance, certain albumin fusion proteins of the invention may be administered in natural products, including milk or milk product obtained from a transgenic mammal which expresses albumin fusion protein. Such compositions can also include plant or plant products obtained from a transgenic plant which expresses the albumin fusion protein. The albumin fusion protein can also be provided in powder or tablet form, with or without other known additives, carriers, fillers and diluents. Nutraceuticals are described in Scott Hegenhart, Food Product Design, December 1993.

[0446] The invention also provides methods of treatment and/or prevention of diseases or disorders (such as, for example, any one or more of the diseases or disorders disclosed herein) by administration to a subject of an effective amount of an albumin fusion protein of the invention or a polynucleotide encoding an albumin fusion protein of the invention (“albumin fusion polynucleotide”) in a pharmaceutically acceptable carrier.

[0447] The albumin fusion protein and/or polynucleotide will be formulated and dosed in a fashion consistent with good medical practice, taking into account the clinical condition of the individual patient (especially the side effects of treatment with the albumin fusion protein and/or polynucleotide alone), the site of delivery, the method of administration, the scheduling of administration, and other factors known to practitioners. The “effective amount” for purposes herein is thus determined by such considerations.

[0448] As a general proposition, the total pharmaceutically effective amount of the albumin fusion protein administered parenterally per dose will be in the range of about 1 ug/kg/day to 10 mg/kg/day of patient body weight, although, as noted above, this will be subject to therapeutic discretion. More preferably, this dose is at least 0.01 mg/kg/day, and most preferably for humans between about 0.01 and 1 mg/kg/day for the hormone. If given continuously, the albumin fusion protein is typically administered at a dose rate of about 1 ug/kg/hour to about 50 ug/kg/hour, either by 1-4 injections per day or by continuous subcutaneous infusions, for example, using a mini-pump. An intravenous bag solution may also be employed. The length of treatment needed to observe changes and the interval following treatment for responses to occur appears to vary depending on the desired effect.

[0449] Albumin fusion proteins and/or polynucleotides can be are administered orally, rectally, parenterally, intracisternally, intravaginally, intraperitoneally, topically (as by powders, ointments, gels, drops or transdermal patch), bucally, or as an oral or nasal spray. “Pharmaceutically acceptable carrier” refers to a non-toxic solid, semisolid or liquid filler, diluent, encapsulating material or formulation auxiliary of any. The term “parenteral” as used herein refers to modes of administration which include intravenous, intramuscular, intraperitoneal, intrasternal, subcutaneous and intraarticular injection and infusion.

[0450] Albumin fusion proteins and/or polynucleotides of the invention are also suitably administered by sustained-release systems. Examples of sustained-release albumin fusion proteins and/or polynucleotides are administered orally, rectally, parenterally, intracisternally, intravaginally, intraperitoneally, topically (as by powders, ointments, gels, drops or transdermal patch), bucally, or as an oral or nasal spray. “Pharmaceutically acceptable carrier” refers to a non-toxic solid, semisolid or liquid filler, diluent, encapsulating material or formulation auxiliary of any type. The term “parenteral” as used herein refers to modes of administration which include intravenous, intramuscular, intraperitoneal, intrasternal, subcutaneous and intraarticular injection and infusion. Additional examples of sustained-release albumin fusion proteins and/or polynucleotides include suitable polymeric materials (such as, for example, semi-permeable polymer matrices in the form of shaped articles, e.g., films, or mirocapsules), suitable hydrophobic materials (for example as an emulsion in an acceptable oil) or ion exchange resins, and sparingly soluble derivatives (such as, for example, a sparingly soluble salt).

[0451] Sustained-release matrices include polylactides (U.S. Pat. No. 3,773,919, EP 58,481), copolymers of L-glutamic acid and gamma-ethyl-L-glutamate (Sidman et al., Biopolymers 22:547-556 (1983)), poly (2-hydroxyethyl methacrylate) (Langer et al., J. Biomed. Mater. Res. 15:167-277 (1981), and Langer, Chem. Tech. 12:98-105 (1982)), ethylene vinyl acetate (Langer et al., Id.) or poly-D-(−)-3-hydroxybutyric acid (EP 133,988).

[0452] Sustained-release albumin fusion proteins and/or polynucleotides also include liposomally entrapped albumin fusion proteins and/or polynucleotides of the invention (see generally, Langer, Science 249:1527-1533 (1990); Treat et al., in Liposomes in the Therapy of Infectious Disease and Cancer, Lopez-Berestein and Fidler (eds.), Liss, New York, pp. 317-327 and 353-365 (1989)). Liposomes containing the albumin fusion protein and/or polynucleotide are prepared by methods known per se: DE 3,218,121; Epstein et al., Proc. Natl. Acad. Sci. (USA) 82:3688-3692 (1985); Hwang et al., Proc. Natl. Acad. Sci.(USA) 77:4030-4034 (1980); EP 52,322; EP 36,676; EP 88,046; EP 143,949; EP 142,641; Japanese Pat. Appl. 83-118008; U.S. Pat. Nos. 4,485,045 and 4,544,545; and EP 102,324. Ordinarily, the liposomes are of the small (about 200-800 Angstroms) unilamellar type in which the lipid content is greater than about 30 mol. percent cholesterol, the selected proportion being adjusted for the optimal Therapeutic.

[0453] In yet an additional embodiment, the albumin fusion proteins and/or polynucleotides of the invention are delivered by way of a pump (see Langer, supra; Sefton, CRC Crit. Ref. Biomed. Eng. 14:201 (1987); Buchwald et al., Surgery 88:507 (1980); Saudek et al., N. Engl. J. Med. 321:574 (1989)).

[0454] Other controlled release systems are discussed in the review by Langer (Science 249:1527-1533 (1990)).

[0455] For parenteral administration, in one embodiment, the albumin fusion protein and/or polynucleotide is formulated generally by mixing it at the desired degree of purity, in a unit dosage injectable form (solution, suspension, or emulsion), with a pharmaceutically acceptable carrier, i.e., one that is non-toxic to recipients at the dosages and concentrations employed and is compatible with other ingredients of the formulation. For example, the formulation preferably does not include oxidizing agents and other compounds that are known to be deleterious to the Therapeutic.

[0456] Generally, the formulations are prepared by contacting the albumin fusion protein and/or polynucleotide uniformly and intimately with liquid carriers or finely divided solid carriers or both. Then, if necessary, the product is shaped into the desired formulation. Preferably the carrier is a parenteral carrier, more preferably a solution that is isotonic with the blood of the recipient. Examples of such carrier vehicles include water, saline, Ringer's solution, and dextrose solution. Non-aqueous vehicles such as fixed oils and ethyl oleate are also useful herein, as well as liposomes.

[0457] The carrier suitably contains minor amounts of additives such as substances that enhance isotonicity and chemical stability. Such materials are non-toxic to recipients at the dosages and concentrations employed, and include buffers such as phosphate, citrate, succinate, acetic acid, and other organic acids or their salts; antioxidants such as ascorbic acid; low molecular weight (less than about ten residues) polypeptides, e.g., polyarginine or tripeptides; proteins, such as serum albumin, gelatin, or immunoglobulins; hydrophilic polymers such as polyvinylpyrrolidone; amino acids, such as glycine, glutamic acid, aspartic acid, or arginine; monosaccharides, disaccharides, and other carbohydrates including cellulose or its derivatives, glucose, manose, or dextrins; chelating agents such as EDTA; sugar alcohols such as mannitol or sorbitol; counterions such as sodium; and/or nonionic surfactants such as polysorbates, poloxamers, or PEG.

[0458] The albumin fusion protein is typically formulated in such vehicles at a concentration of about 0.1 mg/ml to 100 mg/ml, preferably 1-10 mg/ml, at a pH of about 3 to 8. It will be understood that the use of certain of the foregoing excipients, carriers, or stabilizers will result in the formation of polypeptide salts.

[0459] Any pharmaceutical used for therapeutic administration can be sterile. Sterility is readily accomplished by filtration through sterile filtration membranes (e.g., 0.2 micron membranes). Albumin fusion proteins and/or polynucleotides generally are placed into a container having a sterile access port, for example, an intravenous solution bag or vial having a stopper pierceable by a hypodermic injection needle.

[0460] Albumin fusion proteins and/or polynucleotides ordinarily will be stored in unit or multi-dose containers, for example, sealed ampoules or vials, as an aqueous solution or as a lyophilized formulation for reconstitution. As an example of a lyophilized formulation, 10-ml vials are filled with 5 ml of sterile-filtered 1% (w/v) aqueous albumin fusion protein and/or polynucleotide solution, and the resulting mixture is lyophilized. The infusion solution is prepared by reconstituting the lyophilized albumin fusion protein and/or polynucleotide using bacteriostatic Water-for-Injection.

[0461] In a specific and preferred embodiment, the Albumin fusion protein formulations comprises 0.01 M sodium phosphate, 0.15 mM sodium chloride, 0.16 micromole sodium octanoate/milligram of fusion protein, 15 micrograms/milliliter polysorbate 80, pH 7.2. In another specific and preferred embodiment, the Albumin fusion protein formulations consists 0.01 M sodium phosphate, 0.15 mM sodium chloride, 0.16 micromole sodium octanoate/milligram of fusion protein, 15 micrograms/milliliter polysorbate 80, pH 7.2. The pH and buffer are chosen to match physiological conditions and the salt is added as a tonicifier. Sodium octanoate has been chosen due to its reported ability to increase the thermal stability of the protein in solution. Finally, polysorbate has been added as a generic surfactant, which lowers the surface tension of the solution and lowers non-specific adsorption of the albumin fusion protein to the container closure system.

[0462] The invention also provides a pharmaceutical pack or kit comprising one or more containers filled with one or more of the ingredients of the albumin fusion proteins and/or polynucleotides of the invention. Associated with such container(s) can be a notice in the form prescribed by a governmental agency regulating the manufacture, use or sale of pharmaceuticals or biological products, which notice reflects approval by the agency of manufacture, use or sale for human administration. In addition, the albumin fusion proteins and/or polynucleotides may be employed in conjunction with other therapeutic compounds.

[0463] The albumin fusion proteins and/or polynucleotides of the invention may be administered alone or in combination with adjuvants. Adjuvants that may be administered with the albumin fusion proteins and/or polynucleotides of the invention include, but are not limited to, alum, alum plus deoxycholate (ImmunoAg), MTP-PE (Biocine Corp.), QS21 (Genentech, Inc.), BCG (e.g., THERACYS®), MPL and nonviable preparations of Corynebacterium parvum. In a specific embodiment, albumin fusion proteins and/or polynucleotides of the invention are administered in combination with alum. In another specific embodiment, albumin fusion proteins and/or polynucleotides of the invention are administered in combination with QS-21. Further adjuvants that may be administered with the albumin fusion proteins and/or polynucleotides of the invention include, but are not limited to, Monophosphoryl lipid immunomodulator, AdjuVax 100a, QS-21, QS-18, CRL1005, Aluminum salts, MF-59, and Virosomal adjuvant technology. Vaccines that may be administered with the albumin fusion proteins and/or polynucleotides of the invention include, but are not limited to, vaccines directed toward protection against MMR (measles, mumps, rubella), polio, varicella, tetanus/diptheria, hepatitis A, hepatitis B, Haemophilus influenzae B, whooping cough, pneumonia, influenza, Lyme's Disease, rotavirus, cholera, yellow fever, Japanese encephalitis, poliomyelitis, rabies, typhoid fever, and pertussis. Combinations may be administered either concomitantly, e.g., as an admixture, separately but simultaneously or concurrently; or sequentially. This includes presentations in which the combined agents are administered together as a therapeutic mixture, and also procedures in which the combined agents are administered separately but simultaneously, e.g., as through separate intravenous lines into the same individual. Administration “in combination” further includes the separate administration of one of the compounds or agents given first, followed by the second.

[0464] The albumin fusion proteins and/or polynucleotides of the invention may be administered alone or in combination with other therapeutic agents. Albumin fusion protein and/or polynucleotide agents that may be administered in combination with the albumin fusion proteins and/or polynucleotides of the invention, include but not limited to, chemotherapeutic agents, antibiotics, steroidal and non-steroidal anti-inflammatories, conventional immunotherapeutic agents, and/or therapeutic treatments described below. Combinations may be administered either concomitantly, e.g., as an admixture, separately but simultaneously or concurrently; or sequentially. This includes presentations in which the combined agents are administered together as a therapeutic mixture, and also procedures in which the combined agents are administered separately but simultaneously, e.g., as through separate intravenous lines into the same individual. Administration “in combination” further includes the separate administration of one of the compounds or agents given first, followed by the second.

[0465] In one embodiment, the albumin fusion proteins and/or polynucleotides of the invention are administered in combination with an anticoagulant. Anticoagulants that may be administered with the compositions of the invention include, but are not limited to, heparin, low molecular weight heparin, warfarin sodium (e.g., COUMADIN®), dicumarol, 4-hydroxycoumarin, anisindione (e.g., MIRADON™), acenocoumarol (e.g., nicoumalone, SINTHROME™), indan-1,3-dione, phenprocoumon (e.g., MARCUMAR™), ethyl biscoumacetate (e.g., TROMEXAN™), and aspirin. In a specific embodiment, compositions of the invention are administered in combination with heparin and/or warfarin. In another specific embodiment, compositions of the invention are administered in combination with warfarin. In another specific embodiment, compositions of the invention are administered in combination with warfarin and aspirin. In another specific embodiment, compositions of the invention are administered in combination with heparin. In another specific embodiment, compositions of the invention are administered in combination with heparin and aspirin.

[0466] In another embodiment, the albumin fusion proteins and/or polynucleotides of the invention are administered in combination with thrombolytic drugs. Thrombolytic drugs that may be administered with the compositions of the invention include, but are not limited to, plasminogen, lys-plasminogen, alpha2-antiplasmin, streptokinae (e.g., KABIKINASE™), antiresplace (e.g., EMINASE™), tissue plasminogen activator (t-PA, altevase, ACTIVASE™), urokinase (e.g., ABBOKINASE™), sauruplase, (Prourokinase, single chain urokinase), and aminocaproic acid (e.g., AMICAR™). In a specific embodiment, compositions of the invention are administered in combination with tissue plasminogen activator and aspirin.

[0467] In another embodiment, the albumin fusion proteins and/or polynucleotides of the invention are administered in combination with antiplatelet drugs. Antiplatelet drugs that may be administered with the compositions of the invention include, but are not limited to, aspirin, dipyridamole (e.g., PERSANTINE™), and ticlopidine (e.g., TICLID™).

[0468] In specific embodiments, the use of anti-coagulants, thrombolytic and/or antiplatelet drugs in combination with albumin fusion proteins and/or polynucleotides of the invention is contemplated for the prevention, diagnosis, and/or treatment of thrombosis, arterial thrombosis, venous thrombosis, thromboembolism, pulmonary embolism, atherosclerosis, myocardial infarction, transient ischemic attack, unstable angina. In specific embodiments, the use of anticoagulants, thrombolytic drugs and/or antiplatelet drugs in combination with albumin fusion proteins and/or polynucleotides of the invention is contemplated for the prevention of occulsion of saphenous grafts, for reducing the risk of periprocedural thrombosis as might accompany angioplasty procedures, for reducing the risk of stroke in patients with atrial fibrillation including nonrheumatic atrial fibrillation, for reducing the risk of embolism associated with mechanical heart valves and or mitral valves disease. Other uses for the therapeutics of the invention, alone or in combination with antiplatelet, anticoagulant, and/or thrombolytic drugs, include, but are not limited to, the prevention of occlusions in extracorporeal devices (e.g., intravascular canulas, vascular access shunts in hemodialysis patients, hemodialysis machines, and cardiopulmonary bypass machines).

[0469] In certain embodiments, albumin fusion proteins and/or polynucleotides of the invention are administered in combination with antiretroviral agents, nucleoside/nucleotide reverse transcriptase inhibitors (NRTIs), non-nucleoside reverse transcriptase inhibitors (NNRTIs), and/or protease inhibitors (PIs). NRTIs that may be administered in combination with the albumin fusion proteins and/or polynucleotides of the invention, include, but are not limited to, RETROVIR™ (zidovudine/AZT), VIDEX™ (didanosine/ddI), HVID™ (zalcitabine/ddC), ZERIT™ (stavudine/d4T), EPIVIR™ (lamivudine/3TC), and COMBIVIR™ (zidovudine/lamivudine). NNRTIs that may be administered in combination with the albumin fusion proteins and/or polynucleotides of the invention, include, but are not limited to, VIRAMUNE™ (nevirapine), RESCRIPTOR™ (delavirdine), and SUSTIVA™ (efavirenz). Protease inhibitors that may be administered in combination with the albumin fusion proteins and/or polynucleotides of the invention, include, but are not limited to, CRIXIVAN™ (indinavir), NORVIR™ (ritonavir), INVRASE™ (saquinavir), and VIRACEPT™ (nelfinavir). In a specific embodiment, antiretroviral agents, nucleoside reverse transcriptase inhibitors, non-nucleoside reverse transcriptase inhibitors, and/or protease inhibitors may be used in any combination with albumin fusion proteins and/or polynucleotides of the invention to treat AIDS and/or to prevent or treat HIV infection.

[0470] Additional NRTIs include LODENOSINE™ (F-ddA; an acid-stable adenosine NRTI; Triangle/Abbott; COVIRACIL™ (emtricitabine/FTC; structurally related to lamivudine (3TC) but with 3- to 10-fold greater activity in vitro; Triangle/Abbott); dOTC (BCH-10652, also structurally related to lamivudine but retains activity against a substantial proportion of lamivudine-resistant isolates; Biochem Pharma); Adefovir (refused approval for anti-HIV therapy by FDA; Gilead Sciences); PREVEON® (Adefovir Dipivoxil, the active prodrug of adefovir; its active form is PMEA-pp); TENOFOVIR™ (bis-POC PMPA, a PMPA prodrug; Gilead); DAPD/DXG (active metabolite of DAPD; Triangle/Abbott); D-D4FC (related to 3TC, with activity against AZT/3TC-resistant virus); GW420867X (Glaxo Wellcome); ZIAGEN™ (abacavir/159U89; Glaxo Wellcome Inc.); CS-87 (3′azido-2′,3′-dideoxyuridine; WO 99/66936); and S-acyl-2-thioethyl (SATE)-bearing prodrug forms of β-L-FD4C and β-L-FddC (WO 98/17281).

[0471] Additional NNRTIs include COACTINON™ (Emivirine/MKC-442, potent NNRTI of the HEPT class; Triangle/Abbott); CAPRAVIRINE™ (AG-1549/S-1153, a next generation NNRTI with activity against viruses containing the K103N mutation; Agouron); PNU-142721 (has 20- to 50-fold greater activity than its predecessor delavirdine and is active against K103N mutants; Pharmacia & Upjohn); DPC-961 and DPC-963 (second-generation derivatives of efavirenz, designed to be active against viruses with the K103N mutation; DuPont); GW-420867×(has 25-fold greater activity than HBY097 and is active against K103N mutants; Glaxo Wellcome); CALANOLIDE A (naturally occurring agent from the latex tree; active against viruses containing either or both the Y181C and K103N mutations); and Propolis (WO 99/49830).

[0472] Additional protease inhibitors include LOPINAVIR™ (ABT378/r; Abbott Laboratories); BMS-232632 (an azapeptide; Bristol-Myres Squibb); TIPRANAVIR™ (PNU-140690, a non-peptic dihydropyrone; Pharmacia & Upjohn); PD-178390 (a nonpeptidic dihydropyrone; Parke-Davis); BMS 232632 (an azapeptide; Bristol-Myers Squibb); L-756,423 (an indinavir analog; Merck); DMP-450 (a cyclic urea compound; Avid & DuPont); AG-1776 (a peptidomimetic with in vitro activity against protease inhibitor-resistant viruses; Agouron); VX-175/GW-433908 (phosphate prodrug of amprenavir; Vertex & Glaxo Welcome); CGP61755 (Ciba); and AGENERASE™ (amprenavir; Glaxo Wellcome Inc.).

[0473] Additional antiretroviral agents include fusion inhibitors/gp41 binders. Fusion inhibitors/gp41 binders include T-20 (a peptide from residues 643-678 of the HIV gp41 transmembrane protein ectodomain which binds to gp41 in its resting state and prevents transformation to the fusogenic state; Trimeris) and T-1249 (a second-generation fusion inhibitor; Trimeris).

[0474] Additional antiretroviral agents include fusion inhibitors/chemokine receptor antagonists. Fusion inhibitors/chemokine receptor antagonists include CXCR4 antagonists such as AMD 3100 (a bicyclam), SDF-1 and its analogs, and ALX40-4C (a cationic peptide), T22 (an 18 amino acid peptide; Trimeris) and the T22 analogs T134 and T140; CCR5 antagonists such as RANTES (9-68), AOP-RANTES, NNY-RANTES, and TAK-779; and CCR5/CXCR4 antagonists such as NSC 651016 (a distamycin analog). Also included are CCR2B, CCR3, and CCR6 antagonists. Chemokine recpetor agonists such as RANTES, SDF-1, MIP-1α, MIP-1β, etc., may also inhibit fusion.

[0475] Additional antiretroviral agents include integrase inhibitors. Integrase inhibitors include dicaffeoylquinic (DFQA) acids; L-chicoric acid (a dicaffeoyltartaric (DCTA) acid); quinalizarin (QLC) and related anthraquinones; ZINTEVIR™ (AR 177, an oligonucleotide that probably acts at cell surface rather than being a true integrase inhibitor; Arondex); and naphthols such as those disclosed in WO 98/50347.

[0476] Additional antiretroviral agents include hydroxyurea-like compunds such as BCX-34 (a purine nucleoside phosphorylase inhibitor; Biocryst); ribonucleotide reductase inhibitors such as DIDOX™ (Molecules for Health); inosine monophosphate dehydrogenase (IMPDH) inhibitors sucha as VX-497 (Vertex); and mycopholic acids such as CellCept (mycophenolate mofetil; Roche).

[0477] Additional antiretroviral agents include inhibitors of viral integrase, inhibitors of viral genome nuclear translocation such as arylene bis(methylketone) compounds; inhibitors of HIV entry such as AOP-RANTES, NNY-RANTES, RANTES-IgG fusion protein, soluble complexes of RANTES and glycosaminoglycans (GAG), and AMD-3100; nucleocapsid zinc finger inhibitors such as dithiane compounds; targets of HIV Tat and Rev; and pharmacoenhancers such as ABT-378.

[0478] Other antiretroviral therapies and adjunct therapies include cytokines and lymphokines such as MIP-1α, MIP-1β, SDF-1α, IL-2, PROLEUKIN™ (aldesleukin/L2-7001; Chiron), 1L-4, IL-10, IL-12, and IL-13; interferons such as IFN-α2a; antagonists of TNFs, NFκB, GM-CSF, M-CSF, and IL-10; agents that modulate immune activation such as cyclosporin and prednisone; vaccines such as Remune™ (HIV Immunogen), APL 400-003 (Apollon), recombinant gp120 and fragments, bivalent (B/E) recombinant envelope glycoprotein, rgp120CM235, MN rgp120, SF-2 rgp120, gp120/soluble CD4 complex, Delta JR-FL protein, branched synthetic peptide derived from discontinuous gp120 C3/C4 domain, fusion-competent immunogens, and Gag, Pol, Nef, and Tat vaccines; gene-based therapies such as genetic suppressor elements (GSEs; WO 98/54366), and intrakines (genetically modified CC chemokines targetted to the ER to block surface expression of newly synthesized CCR5 (Yang et al., PNAS 94:11567-72 (1997); Chen et al., Nat. Med. 3:1110-16 (1997)); antibodies such as the anti-CXCR4 antibody 12G5, the anti-CCR5 antibodies 2D7, 5C7, PA8, PA9, PA10, PA11, PA12, and PA14, the anti-CD4 antibodies Q4120 and RPA-T4, the anti-CCR3 antibody 7B11, the anti-gp120 antibodies 17b, 48d, 447-52D, 257-D, 268-D and 50.1, anti-Tat antibodies, anti-TNF-α antibodies, and monoclonal antibody 33A; aryl hydrocarbon (AH) receptor agonists and antagonists such as TCDD, 3,3′,4,4′,5-pentachlorobiphenyl, 3,3′,4,4′-tetrachlorobiphenyl, and α-naphthoflavone (WO 98/30213); and antioxidants such as γ-L-glutamyl-L-cysteine ethyl ester (γ-GCE; WO 99/56764).

[0479] In a further embodiment, the albumin fusion proteins and/or polynucleotides of the invention are administered in combination with an antiviral agent. Antiviral agents that may be administered with the albumin fusion proteins and/or polynucleotides of the invention include, but are not limited to, acyclovir, ribavirin, amantadine, and remantidine.

[0480] In other embodiments, albumin fusion proteins and/or polynucleotides of the invention may be administered in combination with anti-opportunistic infection agents. Anti-opportunistic agents that may be administered in combination with the albumin fusion proteins and/or polynucleotides of the invention, include, but are not limited to, TRIMETHOPRIM-SULFAMETHOXAZOLE™, DAPSONE™, PENTAMIDNE™, ATOVAQUONE™, ISONIAZID™, RIFAMPIN™, PYRAZINAMIDE™, ETHAMBUTOL™, RIFABUTIN™, CLARITHROMYCIN™, AZITHROMYCIN™, GANCICLOVIR™, FOSCARNET™, CIDOFOVIR™, FLUCONAZOLE™, ITRACONAZOLE™, KETOCONAZOLE™, ACYCLOVIR™, FAMCICOLVIR™, PYRIMETHAMINE™, LEUCOVORIN™, NEUPOGEN™ (filgrastim/G-CSF), and LEUKINE™ (sargramostim/GM-CSF). In a specific embodiment, albumin fusion proteins and/or polynucleotides of the invention are used in any combination with TRIMETHOPRIM-SULFAMETHOXAZOLE™, DAPSONE™, PENTAMIDINE™, and/or ATOVAQUONE™ to prophylactically treat or prevent an opportunistic Pneumocystis carinii pneumonia infection. In another specific embodiment, albumin fusion proteins and/or polynucleotides of the invention are used in any combination with ISONIAZID™, RIFAMPIN™, PYRAZINAMIDE™, and/or ETHAMBUTOL™ to prophylactically treat or prevent an opportunistic Mycobacterium avium complex infection. In another specific embodiment, albumin fusion proteins and/or polynucleotides of the invention are used in any combination with RIFABUTIN™, CLARITHROMYCIN™, and/or AZITHROMYCIN™ to prophylactically treat or prevent an opportunistic Mycobacterium tuberculosis infection. In another specific embodiment, albumin fusion proteins and/or polynucleotides of the invention are used in any combination with GANCICLOVIR™, FOSCARNET™, and/or CIDOFOVIR™ to prophylactically treat or prevent an opportunistic cytomegalovirus infection. In another specific embodiment, albumin fusion proteins and/or polynucleotides of the invention are used in any combination with FLUCONAZOLE™, ITRACONAZOLE™, and/or KETOCONAZOLE™ to prophylactically treat or prevent an opportunistic fungal infection. In another specific embodiment, albumin fusion proteins and/or polynucleotides of the invention are used in any combination with ACYCLOVIR™ and/or FAMCICOLVIR™ to prophylactically treat or prevent an opportunistic herpes simplex virus type I and/or type II infection. In another specific embodiment, albumin fusion proteins and/or polynucleotides of the invention are used in any combination with PYRIMETHAMINE™ and/or LEUCOVORIN™ to prophylactically treat or prevent an opportunistic Toxoplasma gondii infection. In another specific embodiment, albumin fusion proteins and/or polynucleotides of the invention are used in any combination with LEUCOVORIN™ and/or NEUPOGEN™ to prophylactically treat or prevent an opportunistic bacterial infection.

[0481] In a further embodiment, the albumin fusion proteins and/or polynucleotides of the invention are administered in combination with an antibiotic agent. Antibiotic agents that may be administered with the albumin fusion proteins and/or polynucleotides of the invention include, but are not limited to, amoxicillin, beta-lactamases, aminoglycosides, beta-lactam (glycopeptide), beta-lactamases, Clindamycin, chloramphenicol, cephalosporins, ciprofloxacin, erythromycin, fluoroquinolones, macrolides, metronidazole, penicillins, quinolones, rapamycin, rifampin, streptomycin, sulfonamide, tetracyclines, trimethoprim, trimethoprim-sulfamethoxazole, and vancomycin.

[0482] In other embodiments, the albumin fusion proteins and/or polynucleotides of the invention are administered in combination with immunostimulants. Immunostimulants that may be administered in combination with the albumin fusion proteins and/or polynucleotides of the invention include, but are not limited to, levamisole (e.g., ERGAMISOL™), isoprinosine (e.g. INOSIPLEX™), interferons (e.g. interferon alpha), and interleukins (e.g., IL-2).

[0483] In other embodiments, albumin fusion proteins and/or polynucleotides of the invention are administered in combination with immunosuppressive agents. Immunosuppressive agents that may be administered in combination with the albumin fusion proteins and/or polynucleotides of the invention include, but are not limited to, steroids, cyclosporine, cyclosporine analogs, cyclophosphamide methylprednisone, prednisone, azathioprine, FK-506, 15-deoxyspergualin, and other immunosuppressive agents that act by suppressing the function of responding T cells. Other immunosuppressive agents that may be administered in combination with the albumin fusion proteins and/or polynucleotides of the invention include, but are not limited to, prednisolone, methotrexate, thalidomide, methoxsalen, rapamycin, leflunomide, mizoribine (BREDININ™), brequinar, deoxyspergualin, and azaspirane (SKF 105685), ORTHOCLONE OKT® 3 (muromonab-CD3), SANDIMMUNE™, NEORAL™, SANGDYA™ (cyclosporine), PROGRAF® (FK506, tacrolimus), CELLCEPT® (mycophenolate motefil, of which the active metabolite is mycophenolic acid), IMURAN™ (azathioprine), glucocorticosteroids, adrenocortical steroids such as DELTASONE™ (prednisone) and HYDELTRASOL™ (prednisolone), FOLEX™ and MEXATE™ (methotrxate), OXSORALEN-ULTRA™ (methoxsalen) and RAPAMUNE™ (sirolimus). In a specific embodiment, immunosuppressants may be used to prevent rejection of organ or bone marrow transplantation.

[0484] In an additional embodiment, albumin fusion proteins and/or polynucleotides of the invention are administered alone or in combination with one or more intravenous immune globulin preparations. Intravenous immune globulin preparations that may be administered with the albumin fusion proteins and/or polynucleotides of the invention include, but not limited to, GAMMAR™, IVEEGAM™, SANDOGLOBULIN™, GAMMAGARD S/D™, ATGAM™ (antithymocyte glubulin), and GAMIMUNE™. In a specific embodiment, albumin fusion proteins and/or polynucleotides of the invention are administered in combination with intravenous immune globulin preparations in transplantation therapy (e.g., bone marrow transplant).

[0485] In certain embodiments, the albumin fusion proteins and/or polynucleotides of the invention are administered alone or in combination with an anti-inflammatory agent. Anti-inflammatory agents that may be administered with the albumin fusion proteins and/or polynucleotides of the invention include, but are not limited to, corticosteroids (e.g. betamethasone, budesonide, cortisone, dexamethasone, hydrocortisone, methylprednisolone, prednisolone, prednisone, and triamcinolone), nonsteroidal anti-inflammatory drugs (e.g., diclofenac, diflunisal, etodolac, fenoprofen, floctafenine, flurbiprofen, ibuprofen, indomethacin, ketoprofen, meclofenamate, mefenamic acid, meloxicam, nabumetone, naproxen, oxaprozin, phenylbutazone, piroxicam, sulindac, tenoxicam, tiaprofenic acid, and tolmetin.), as well as antihistamines, aminoarylcarboxylic acid derivatives, arylacetic acid derivatives, arylbutyric acid derivatives, arylcarboxylic acids, arylpropionic acid derivatives, pyrazoles, pyrazolones, salicylic acid derivatives, thiazinecarboxamides, e-acetamidocaproic acid, S-adenosylmethionine, 3-amino-4-hydroxybutyric acid, amixetrine, bendazac, benzydamine, bucolome, difenpiramide, ditazol, emorfazone, guaiazulene, nabumetone, nimesulide, orgotein, oxaceprol, paranyline, perisoxal, pifoxime, proquazone, proxazole, and tenidap.

[0486] In an additional embodiment, the compositions of the invention are administered alone or in combination with an anti-angiogenic agent. Anti-angiogenic agents that may be administered with the compositions of the invention include, but are not limited to, Angiostatin (Entremed, Rockville, Md.), Troponin-1 (Boston Life Sciences, Boston, Mass.), anti-Invasive Factor, retinoic acid and derivatives thereof, paclitaxel (Taxol), Suramin, Tissue Inhibitor of Metalloproteinase-1, Tissue Inhibitor of Metalloproteinase-2, VEGI, Plasminogen Activator Inhibitor-1, Plasminogen Activator Inhibitor-2, and various forms of the lighter “d group” transition metals.

[0487] Lighter “d group” transition metals include, for example, vanadium, molybdenum, tungsten, titanium, niobium, and tantalum species. Such transition metal species may form transition metal complexes. Suitable complexes of the above-mentioned transition metal species include oxo transition metal complexes.

[0488] Representative examples of vanadium complexes include oxo vanadium complexes such as vanadate and vanadyl complexes. Suitable vanadate complexes include metavanadate and orthovanadate complexes such as, for example, ammonium metavanadate, sodium metavanadate, and sodium orthovanadate. Suitable vanadyl complexes include, for example, vanadyl acetylacetonate and vanadyl sulfate including vanadyl sulfate hydrates such as vanadyl sulfate mono- and trihydrates.

[0489] Representative examples of tungsten and molybdenum complexes also include oxo complexes. Suitable oxo tungsten complexes include tungstate and tungsten oxide complexes. Suitable tungstate complexes include ammonium tungstate, calcium tungstate, sodium tungstate dihydrate, and tungstic acid. Suitable tungsten oxides include tungsten (IV) oxide and tungsten (VI) oxide. Suitable oxo molybdenum complexes include molybdate, molybdenum oxide, and molybdenyl complexes. Suitable molybdate complexes include ammonium molybdate and its hydrates, sodium molybdate and its hydrates, and potassium molybdate and its hydrates. Suitable molybdenum oxides include molybdenum (VI) oxide, molybdenum (VI) oxide, and molybdic acid. Suitable molybdenyl complexes include, for example, molybdenyl acetylacetonate. Other suitable tungsten and molybdenum complexes include hydroxo derivatives derived from, for example, glycerol, tartaric acid, and sugars.

[0490] A wide variety of other anti-angiogenic factors may also be utilized within the context of the present invention. Representative examples include, but are not limited to, platelet factor 4; protamine sulphate; sulphated chitin derivatives (prepared from queen crab shells), (Murata et al., Cancer Res. 51:22-26, (1991)); Sulphated Polysaccharide Peptidoglycan Complex (SP-PG) (the function of this compound may be enhanced by the presence of steroids such as estrogen, and tamoxifen citrate); Staurosporine; modulators of matrix metabolism, including for example, proline analogs, cishydroxyproline, d,L-3,4-dehydroproline, Thiaproline, alpha,alpha-dipyridyl, aminopropionitrile fumarate; 4-propyl-5-(4-pyridinyl)-2(3H)-oxazolone; Methotrexate; Mitoxantrone; Heparin; Interferons; 2 Macroglobulin-serum; ChIMP-3 (Pavloffet al., J. Bio. Chem. 267:17321-17326, (1992)); Chymostatin (Tomkinson et al., Biochem J. 286:475-480, (1992)); Cyclodextrin Tetradecasulfate; Eponemycin; Camptothecin; Fumagillin (Ingber et al., Nature 348:555-557, (1990)); Gold Sodium Thiomalate (“GST”; Matsubara and Ziff, J. Clin. Invest. 79:1440-1446, (1987)); anticollagenase-serum; alpha2-antiplasmin (Holmes et al., J. Biol. Chem. 262(4):1659-1664, (1987)); Bisantrene (National Cancer Institute); Lobenzarit disodium (N-(2)-carboxyphenyl-4-chloroanthronilic acid disodium or “CCA”; (Takeuchi et al., Agents Actions 36:312-316, (1992)); and metalloproteinase inhibitors such as BB94.

[0491] Additional anti-angiogenic factors that may also be utilized within the context of the present invention include Thalidomide, (Celgene, Warren, N.J.); Angiostatic steroid; AGM-1470 (H. Brem and J. Folkman J Pediatr. Surg. 28:445-51 (1993)); an integrin alpha v beta 3 antagonist (C. Storgard et al., J Clin. Invest. 103:47-54 (1999)); carboxynaminolmidazole; Carboxyamidotriazole (CAI) (National Cancer Institute, Bethesda, Md.); Conbretastatin A-4 (CA4P) (OXiGENE, Boston, Mass.); Squalamine (Magainin Pharmaceuticals, Plymouth Meeting, Pa.); TNP-470, (Tap Pharmaceuticals, Deerfield, Ill.); ZD-0101 AstraZeneca (London, UK); APRA (CT2584); Benefin, Byrostatin-1 (SC339555); CGP-41251 (PKC 412); CM101; Dexrazoxane (ICRF187); DMXAA; Endostatin; Flavopridiol; Genestein; GTE; ImmTher; Iressa (ZD1839); Octreotide (Somatostatin); Panretin; Penacillamine; Photopoint; PI-88; Prinomastat (AG-3340) Purlytin; Suradista (FCE26644); Tamoxifen (Nolvadex); Tazarotene; Tetrathiomolybdate; Xeloda (Capecitabine); and 5-Fluorouracil.

[0492] Anti-angiogenic agents that may be administed in combination with the compounds of the invention may work through a variety of mechanisms including, but not limited to, inhibiting proteolysis of the extracellular matrix, blocking the function of endothelial cell-extracellular matrix adhesion molecules, by antagonizing the function of angiogenesis inducers such as growth factors, and inhibiting integrin receptors expressed on proliferating endothelial cells. Examples of anti-angiogenic inhibitors that interfere with extracellular matrix proteolysis and which may be administered in combination with the compositons of the invention include, but are not lmited to, AG-3340 (Agouron, La Jolla, Calif.), BAY-12-9566 (Bayer, West Haven, Conn.), BMS-275291 (Bristol Myers Squibb, Princeton, N.J.), CGS-27032A (Novartis, East Hanover, N.J.), Marimastat (British Biotech, Oxford, UK), and Metastat (Aeterna, St-Foy, Quebec). Examples of anti-angiogenic inhibitors that act by blocking the function of endothelial cell-extracellular matrix adhesion molecules and which may be administered in combination with the compositons of the invention include, but are not lmited to, EMD-121974 (Merck KcgaA Darmstadt, Germany) and Vitaxin (Ixsys, La Jolla, Calif./Medimmune, Gaithersburg, Md.). Examples of anti-angiogenic agents that act by directly antagonizing or inhibiting angiogenesis inducers and which may be administered in combination with the compositons of the invention include, but are not lmited to, Angiozyme (Ribozyme, Boulder, Colo.), Anti-VEGF antibody (Genentech, S. San Francisco, Calif.), PTK-787/ZK-225846 (Novartis, Basel, Switzerland), SU-101 (Sugen, S. San Francisco, Calif.), SU-5416 (Sugen/Pharmacia Upjohn, Bridgewater, N.J.), and SU-6668 (Sugen). Other anti-angiogenic agents act to indirectly inhibit angiogenesis. Examples of indirect inhibitors of angiogenesis which may be administered in combination with the compositons of the invention include, but are not limited to, IM-862 (Cytran, Kirkland, Wash.), Interferon-alpha, IL-12 (Roche, Nutley, N.J.), and Pentosan polysulfate (Georgetown University, Washington, D.C.).

[0493] In particular embodiments, the use of compositions of the invention in combination with anti-angiogenic agents is contemplated for the treatment, prevention, and/or amelioration of an autoimmune disease, such as for example, an autoimmune disease described herein.

[0494] In a particular embodiment, the use of compositions of the invention in combination with anti-angiogenic agents is contemplated for the treatment, prevention, and/or amelioration of arthritis. In a more particular embodiment, the use of compositions of the invention in combination with anti-angiogenic agents is contemplated for the treatment, prevention, and/or amelioration of rheumatoid arthritis.

[0495] In another embodiment, the polynucleotides encoding a polypeptide of the present invention are administered in combination with an angiogenic protein, or polynucleotides encoding an angiogenic protein. Examples of angiogenic proteins that may be administered with the compositions of the invention include, but are not limited to, acidic and basic fibroblast growth factors, VEGF-1, VEGF-2, VEGF-3, epidermal growth factor alpha and beta, platelet-derived endothelial cell growth factor, platelet-derived growth factor, tumor necrosis factor alpha, hepatocyte growth factor, insulin-like growth factor, colony stimulating factor, macrophage colony stimulating factor, granulocyte/macrophage colony stimulating factor, and nitric oxide synthase.

[0496] In additional embodiments, compositions of the invention are administered in combination with a chemotherapeutic agent. Chemotherapeutic agents that may be administered with the albumin fusion proteins and/or polynucleotides of the invention include, but are not limited to alkylating agents such as nitrogen mustards (for example, Mechlorethamine, cyclophosphamide, Cyclophosphamide Ifosfamide, Melphalan (L-sarcolysin), and Chlorambucil), ethylenimines and methylmelamines (for example, Hexamethylmelamine and Thiotepa), alkyl sulfonates (for example, Busulfan), nitrosoureas (for example, Carmustine (BCNU), Lomustine (CCNU), Semustine (methyl-CCNU), and Streptozocin (streptozotocin)), triazenes (for example, Dacarbazine (DTIC; dimethyltriazenoimidazolecarboxamide)), folic acid analogs (for example, Methotrexate (amethopterin)), pyrimidine analogs (for example, Fluorouacil (5-fluorouracil; 5-FU), Floxuridine (fluorodeoxyuridine; FudR), and Cytarabine (cytosine arabinoside)), purine analogs and related inhibitors (for example, Mercaptopurine (6-mercaptopurine; 6-MP), Thioguanine (6-thioguanine; TG), and Pentostatin (2′-deoxycoformycin)), vinca alkaloids (for example, Vinblastine (VLB, vinblastine sulfate)) and Vincristine (vincristine sulfate)), epipodophyllotoxins (for example, Etoposide and Teniposide), antibiotics (for example, Dactinomycin (actinomycin D), Daunorubicin (daunomycin; rubidomycin), Doxorubicin, Bleomycin, Plicamycin (mithramycin), and Mitomycin (mitomycin C), enzymes (for example, L-Asparaginase), biological response modifiers (for example, Interferon-alpha and interferon-alpha-2b), platinum coordination compounds (for example, Cisplatin (cis-DDP) and Carboplatin), anthracenedione (Mitoxantrone), substituted ureas (for example, Hydroxyurea), methylhydrazine derivatives (for example, Procarbazine (N-methylhydrazine; MIH), adrenocorticosteroids (for example, Prednisone), progestins (for example, Hydroxyprogesterone caproate, Medroxyprogesterone, Medroxyprogesterone acetate, and Megestrol acetate), estrogens (for example, Diethylstilbestrol (DES), Diethylstilbestrol diphosphate, Estradiol, and Ethinyl estradiol), antiestrogens (for example, Tamoxifen), androgens (Testosterone proprionate, and Fluoxymesterone), antiandrogens (for example, Flutamide), gonadotropin-releasing horomone analogs (for example, Leuprolide), other hormones and hormone analogs (for example, methyltestosterone, estramustine, estramustine phosphate sodium, chlorotrianisene, and testolactone), and others (for example, dicarbazine, glutamic acid, and mitotane).

[0497] In one embodiment, the compositions of the invention are administered in combination with one or more of the following drugs: infliximab (also known as Remicade™ Centocor, Inc.), Trocade (Roche, RO-32-3555), Leflunomide (also known as Arava™ from Hoechst Marion Roussel), Kineret™ (an IL-1 Receptor antagonist also known as Anakinra from Amgen, Inc.)

[0498] In a specific embodiment, compositions of the invention are administered in combination with CHOP (cyclophosphamide, doxorubicin, vincristine, and prednisone) or combination of one or more of the components of CHOP. In one embodiment, the compositions of the invention are administered in combination with anti-CD20 antibodies, human monoclonal anti-CD20 antibodies. In another embodiment, the compositions of the invention are administered in combination with anti-CD20 antibodies and CHOP, or anti-CD20 antibodies and any combination of one or more of the components of CHOP, particularly cyclophosphamide and/or prednisone. In a specific embodiment, compositions of the invention are administered in combination with Rituximab. In a further embodiment, compositions of the invention are administered with Rituximab and CHOP, or Rituximab and any combination of one or more of the components of CHOP, particularly cyclophosphamide and/or prednisone. In a specific embodiment, compositions of the invention are administered in combination with tositumomab. In a further embodiment, compositions of the invention are administered with tositumomab and CHOP, or tositumomab and any combination of one or more of the components of CHOP, particularly cyclophosphamide and/or prednisone. The anti-CD20 antibodies may optionally be associated with radioisotopes, toxins or cytotoxic prodrugs.

[0499] In another specific embodiment, the compositions of the invention are administered in combination Zevalin™. In a further embodiment, compositions of the invention are administered with Zevalin™ and CHOP, or Zevalin™ and any combination of one or more of the components of CHOP, particularly cyclophosphamide and/or prednisone. Zevalin™ may be associated with one or more radisotopes. Particularly preferred isotopes are ⁹⁰Y and ¹¹¹In.

[0500] In an additional embodiment, the albumin fusion proteins and/or polynucleotides of the invention are administered in combination with cytokines. Cytokines that may be administered with the albumin fusion proteins and/or polynucleotides of the invention include, but are not limited to, IL2, IL3, IL4, IL5, IL6, IL7, IL10, IL12, IL13, IL15, anti-CD40, CD40L, IFN-gamma and TNF-alpha. In another embodiment, albumin fusion proteins and/or polynucleotides of the invention may be administered with any interleukin, including, but not limited to, IL-1alpha, IL-1beta, IL-2, IL-3, IL-4, IL-5, IL-6, IL-7, IL-8, IL-9, IL-10, IL-11, IL-12, IL-13, IL-14, IL-15, IL-16, IL-17, IL-18, IL-19, IL-20, and IL-21.

[0501] In one embodiment, the albumin fusion proteins and/or polynucleotides of the invention are administered in combination with members of the TNF family. TNF, TNF-related or TNF-like molecules that may be administered with the albumin fusion proteins and/or polynucleotides of the invention include, but are not limited to, soluble forms of TNF-alpha, lymphotoxin-alpha (LT-alpha, also known as TNF-beta), LT-beta (found in complex heterotrimer LT-alpha2-beta), OPGL, FasL, CD27L, CD30L, CD40L, 4-1BBL, DcR3, OX40L, TNF-gamma (International Publication No. WO 96/14328), AIM-I (International Publication No. WO 97/33899), endokine-alpha (International Publication No. WO 98/07880), OPG, and netitrokine-alpha (International Publication No. WO 98/18921, OX40, and nerve growth factor (NGF), and soluble forms of Fas, CD30, CD27, CD40 and 4-IBB, TR2 (International Publication No. WO 96/34095), DR3 (International Publication No. WO 97/33904), DR4 (International Publication No. WO 98/32856), TR5 (International Publication No. WO 98/30693), TRANK, TR9 (International Publication No. WO 98/56892),TR10 (International Publication No. WO 98/54202), 312C2 (International Publication No. WO 98/06842), and TR12, and soluble forms CD154, CD70, and CD153.

[0502] In an additional embodiment, the albumin fusion proteins and/or polynucleotides of the invention are administered in combination with angiogenic proteins. Angiogenic proteins that may be administered with the albumin fusion proteins and/or polynucleotides of the invention include, but are not limited to, Glioma Derived Growth Factor (GDGF), as disclosed in European Patent Number EP-399816; Platelet Derived Growth Factor-A (PDGF-A), as disclosed in European Patent Number EP-682110; Platelet Derived Growth Factor-B (PDGF-B), as disclosed in European Patent Number EP-282317; Placental Growth Factor (PIGF), as disclosed in International Publication Number WO 92/06194; Placental Growth Factor-2 (PIGF-2), as disclosed in Hauser et al., Growth Factors, 4:259-268 (1993); Vascular Endothelial Growth Factor (VEGF), as disclosed in International Publication Number WO 90/13649; Vascular Endothelial Growth Factor-A (VEGF-A), as disclosed in European Patent Number EP-506477; Vascular Endothelial Growth Factor-2 (VEGF-2), as disclosed in International Publication Number WO 96/39515; Vascular Endothelial Growth Factor B (VEGF-3); Vascular Endothelial Growth Factor B-186 (VEGF-B186), as disclosed in International Publication Number WO 96/26736; Vascular Endothelial Growth Factor-D (VEGF-D), as disclosed in International Publication Number WO 98/02543; Vascular Endothelial Growth Factor-D (VEGF-D), as disclosed in International Publication Number WO 98/07832; and Vascular Endothelial Growth Factor-E (VEGF-E), as disclosed in German Patent Number DE19639601. The above mentioned references are herein incorporated by reference in their entireties.

[0503] In an additional embodiment, the albumin fusion proteins and/or polynucleotides of the invention are administered in combination with Fibroblast Growth Factors. Fibroblast Growth Factors that may be administered with the albumin fusion proteins and/or polynucleotides of the invention include, but are not limited to, FGF-1, FGF-2, FGF-3, FGF-4, FGF-5, FGF-6, FGF-7, FGF-8, FGF-9, FGF-10, FGF-11, FGF-12, FGF-13, FGF-14, and FGF-15.

[0504] In an additional embodiment, the albumin fusion proteins and/or polynucleotides of the invention are administered in combination with hematopoietic growth factors. Hematopoietic growth factors that may be administered with the albumin fusion proteins and/or polynucleotides of the invention include, but are not limited to, granulocyte macrophage colony stimulating factor (GM-CSF) (sargramostim, LEUKINE™, PROKINE™), granulocyte colony stimulating factor (G-CSF) (filgrastim, NEUPOGEN™), macrophage colony stimulating factor (M-CSF, CSF-1) erythropoietin (epoetin alfa, EPOGEN™, PROCRIT™), stem cell factor (SCF, c-kit ligand, steel factor), megakaryocyte colony stimulating factor, PIXY321 (a GMCSF/IL-3 fusion protein), interleukins, especially any one or more of IL-1 through IL-12, interferon-gamma, or thrombopoietin.

[0505] In certain embodiments, albumin fusion proteins and/or polynucleotides of the present invention are administered in combination with adrenergic blockers, such as, for example, acebutolol, atenolol, betaxolol, bisoprolol, carteolol, labetalol, metoprolol, nadolol, oxprenolol, penbutolol, pindolol, propranolol, sotalol, and timolol.

[0506] In another embodiment, the albumin fusion proteins and/or polynucleotides of the invention are administered in combination with an antiarrhythmic drug (e.g., adenosine, amidoarone, bretylium, digitalis, digoxin, digitoxin, diliazem, disopyramide, esmolol, flecainide, lidocaine, mexiletine, moricizine, phenytoin, procainamide, N-acetyl procainamide, propafenone, propranolol, quinidine, sotalol, tocainide, and verapamil).

[0507] In another embodiment, the albumin fusion proteins and/or polynucleotides of the invention are administered in combination with diuretic agents, such as carbonic anhydrase-inhibiting agents (e.g., acetazolamide, dichlorphenamide, and methazolamide), osmotic diuretics (e.g., glycerin, isosorbide, mannitol, and urea), diuretics that inhibit Na⁺-K⁺-2Cl⁻ symport (e.g., furosemide, bumetamide, azosemide, piretamide, tripamide, ethacrynic acid, muzolimine, and torsemide), thiazide and thiazide-like diuretics (e.g., bendroflumethiazide, benzthiazide, chlorothiazide, hydrochlorothiazide, hydroflumethiazide, methyclothiazide, polythiazide, trichormethiazide, chlorthalidone, indapamide, metolazone, and quinethazone), potassium sparing diuretics (e.g., amiloride and triamterene), and mineralcorticoid receptor antagonists (e.g., spironolactone, canrenone, and potassium canrenoate).

[0508] In one embodiment, the albumin fusion proteins and/or polynucleotides of the invention are administered in combination with treatments for endocrine and/or hormone imbalance disorders. Treatments for endocrine and/or hormone imbalance disorders include, but are not limited to, ¹²⁷I, radioactive isotopes of iodine such as ¹³¹I and ¹²³I; recombinant growth hormone, such as HUMATROPE™ (recombinant somatropin); growth hormone analogs such as PROTROPIN™ (somatrem); dopamine agonists such as PARLODEL™ (bromocriptine); somatostatin analogs such as SANDOSTATIN™ (octreotide); gonadotropin preparations such as PREGNYL™, A.P.L.™ and PROFASI™ (chorionic gonadotropin (CG)), PERGONAL™ (menotropins), and METRODIN™ (urofollitropin (uFSH)); synthetic human gonadotropin releasing hormone preparations such as FACTREL™ and LUTREPULSE™ (gonadorelin hydrochloride); synthetic gonadotropin agonists such as LUPRON™ (leuprolide acetate), SUPPRELIN™ (histrelin acetate), SYNAREL™ (nafarelin acetate), and ZOLADEX™ (goserelin acetate); synthetic preparations of thyrotropin-releasing hormone such as RELEFACT TRH™ and THYPINONE™ (protirelin); recombinant human TSH such as THYROGEN™; synthetic preparations of the sodium salts of the natural isomers of thyroid hormones such as L-T₄™, SYNTHROID™ and LEVOTHROID™ (levothyroxine sodium), L-T₃™, CYTOMEL™ and TRIOSTAT™ (liothyroine sodium), and THYROLAR™ (liotrix); antithyroid compounds such as 6-n-propylthiouracil (propylthiouracil), 1-methyl-2-mercaptoimidazole and TAPAZOLE™ (methimazole), NEO-MERCAZOLE™ (carbimazole); beta-adrenergic receptor antagonists such as propranolol and esmolol; Ca²⁺ channel blockers; dexamethasone and iodinated radiological contrast agents such as TELEPAQUE™ (iopanoic acid) and ORAGRAFIN™ (sodium ipodate).

[0509] Additional treatments for endocrine and/or hormone imbalance disorders include, but are not limited to, estrogens or congugated estrogens such as ESTRACE™ (estradiol), ESTINYL™ (ethinyl estradiol), PREMARIN™, ESTRATAB™, ORTHO-EST™, OGEN™ and estropipate (estrone), ESTROVIS™ (quinestrol), ESTRADERM™ (estradiol), DELESTROGEN™ and VALERGEN™ (estradiol valerate), DEPO-ESTRADIOL CYPIONATE™ and ESTROJECT LA™ (estradiol cypionate); antiestrogens such as NOLVADEX™ (tamoxifen), SEROPHENE™ and CLOMID™ (clomiphene); progestins such as DURALUTIN™ (hydroxyprogesterone caproate), MPA™ and DEPO-PROVERA™ (medroxyprogesterone acetate), PROVERA™ and CYCRIN™ (MPA), MEGACE™ (megestrol acetate), NORLUTIN™ (norethindrone), and NORLUTATE™ and AYGESTIN™ (norethindrone acetate); progesterone implants such as NORPLANT SYSTEM™ (subdermal implants of norgestrel); antiprogestins such as RU 486™ (mifepristone); hormonal contraceptives such as ENOVID™ (norethynodrel plus mestranol), PROGESTASERT™ (intrauterine device that releases progesterone), LOESTRIN™, BREVICON™, MODICON™, GENORA™, NELONA™, NORINYL™, OVACON-35™ and OVACON-50™ (ethinyl estradiol/norethindrone), LEVLEN™, NORDETTE™, TRI-LEVLEN™ and TRIPHASIL-21™ (ethinyl estradiol/levonorgestrel) LO/OVRAL™ and OVRAL™ (ethinyl estradiol/norgestrel), DEMULEN™ (ethinyl estradiol/ethynodiol diacetate), NORINYL™, ORTHO-NOVUM™, NORETHIN™, GENORA™, and NELOVA™ (norethindrone/mestranol), DESOGEN™ and ORTHO-CEPT™ (ethinyl estradiol/desogestrel), ORTHO-CYCLEN™ and ORTHO-TRICYCLEN™ (ethinyl estradiol/norgestimate), MICRONOR™ and NOR-QD™ (norethindrone), and OVRETTE™ (norgestrel).

[0510] Additional treatments for endocrine and/or hormone imbalance disorders include, but are not limited to, testosterone esters such as methenolone acetate and testosterone undecanoate; parenteral and oral androgens such as TESTOJECT-50™ (testosterone), TESTEX™ (testosterone propionate), DELATESTRYL™ (testosterone enanthate), DEPO-TESTOSTERONE™ (testosterone cypionate), DANOCRINE™ (danazol), HALOTESTIN™ (fluoxymesterone), ORETON METHYL™, TESTRED™ and VIRILON™ (methyltestosterone), and OXANDRIN™ (oxandrolone); testosterone transdermal systems such as TESTODERM™; androgen receptor antagonist and 5-alpha-reductase inhibitors such as ANDROCUR™ (cyproterone acetate), EULEXN™ (flutamide), and PROSCAR™ (finasteride); adrenocorticotropic hormone preparations such as CORTROSYN™ (cosyntropin); adrenocortical steroids and their synthetic analogs such as ACLOVATE™ (alclometasone dipropionate), CYCLOCORT™ (amcinonide), BECLOVENT™ and VANCERIL™ (beclomethasone dipropionate), CELESTONE™ (betamethasone), BENISONE™ and UTICORT™ (betamethasone benzoate), DIPROSONE™ (betamethasone dipropionate), CELESTONE PHOSPHATE™ (betamethasone sodium phosphate), CELESTONE SOLUSPAN™ (betamethasone sodium phosphate and acetate), BETA-VAL™ and VALISONE™ (betamethasone valerate), TEMOVATE™ (clobetasol propionate), CLODERM™ (clocortolone pivalate), CORTEF™ and HYDROCORTONE™ (cortisol (hydrocortisone)), HYDROCORTONE ACETATE™ (cortisol (hydrocortisone) acetate), LOCOID™ (cortisol (hydrocortisone) butyrate), HYDROCORTONE PHOSPHATE™ (cortisol (hydrocortisone) sodium phosphate), A-HYDROCORT™ and SOLU CORTEF™ (cortisol (hydrocortisone) sodium succinate), WESTCORT™ (cortisol (hydrocortisone) valerate), CORTISONE ACETATE™ (cortisone acetate), DESOWEN™ and TRIDESILON™ (desonide), TOPICORT™ (desoximetasone), DECADRON™ (dexamethasone), DECADRON LA™ (dexamethasone acetate), DECADRON PHOSPHATE™ and HEXADROL PHOSPHATE™ (dexamethasone sodium phosphate), FLORONE™ and MAXIFLOR™ (diflorasone diacetate), FLORINEF ACETATE™ (fludrocortisone acetate), AEROBID™ and NASALIDE™ (flunisolide), FLUONID™ and SYNALAR™ (fluocinolone acetonide), LIDEX™ (fluocinonide), FLUOR-OP™ and FML™ (fluorometholone), CORDRAN™ (flurandrenolide), HALOG™ (halcinonide), HMS LIZUIFILM™ (medrysone), MEDROL™ (methylprednisolone), DEPO-MEDROL™ and MEDROL ACETATE™ (methylprednisone acetate), A-METHAPRED™ and SOLUMEDROL™ (methylprednisolone sodium succinate), ELOCON™ (mometasone furoate), HALDRONE™ (paramethasone acetate), DELTA-CORTEF™ (prednisolone), ECONOPRED™ (prednisolone acetate), HYDELTRASOL™ (prednisolone sodium phosphate), HYDELTRA-T.B.A™ (prednisolone tebutate), DELTASONE™ (prednisone), ARISTOCORT™ and KENACORT™ (triamcinolone), KENALOG™ (triamcinolone acetonide), ARISTOCORT™ and KENACORT DIACETATE™ (triamcinolone diacetate), and ARISTOSPAN™ (triamcinolone hexacetonide); inhibitors of biosynthesis and action of adrenocortical steroids such as CYTADREN™ (aminoglutethimide), NIZORAL™ (ketoconazole), MODRASTANE™ (trilostane), and METOPIRONE™ (metyrapone); bovine, porcine or human insulin or mixtures thereof; insulin analogs; recombinant human insulin such as HUMULIN™ and NOVOLIN™; oral hypoglycemic agents such as ORAIMIDE™ and ORINASE™ (tolbutamide), DIABINESE™ (chlorpropamide), TOLAMIDE™ and TOLINASE™ (tolazamide), DYMELOR™ (acetohexamide), glibenclamide, MICRONASE™, DIBETA™ and GLYNASE™ (glyburide), GLUCOTROL™ (glipizide), and DIAMICRON™ (gliclazide), GLUCOPHAGE™ (metformin), ciglitazone, pioglitazone, and alpha-glucosidase inhibitors; bovine or porcine glucagon; somatostatins such as SANDOSTATIN™ (octreotide); and diazoxides such as PROGLYCEM™ (diazoxide).

[0511] In one embodiment, the albumin fusion proteins and/or polynucleotides of the invention are administered in combination with treatments for uterine motility disorders. Treatments for uterine motility disorders include, but are not limited to, estrogen drugs such as conjugated estrogens (e.g., PREMARIN® and ESTRATAB®), estradiols (e.g., CLIMARA® and ALORA®), estropipate, and chlorotrianisene; progestin drugs (e.g., AMEN® (medroxyprogesterone), MICRONOR® (norethidrone acetate), PROMETRIUM® progesterone, and megestrol acetate); and estrogen/progesterone combination therapies such as, for example, conjugated estrogens/medroxyprogesterone (e.g., PREMPRO™ and PREMPHASE®) and norethindrone acetate/ethinyl estsradiol (e.g., FEMHRT™).

[0512] In an additional embodiment, the albumin fusion proteins and/or polynucleotides of the invention are administered in combination with drugs effective in treating iron deficiency and hypochromic anemias, including but not limited to, ferrous sulfate (iron sulfate, FEOSOL™), ferrous fumarate (e.g., FEOSTAT™), ferrous gluconate (e.g., FERGON™), polysaccharide-iron complex (e.g., NIFEREX™), iron dextran injection (e.g., INFED™), cupric sulfate, pyroxidine, riboflavin, Vitamin B₁₂, cyancobalamin injection (e.g., REDISOL™, RUBRAMIN PC™), hydroxocobalamin, folic acid (e.g., FOLVITE™), leucovorin (folinic acid, 5-CHOH4PteGlu, citrovorum factor) or WELLCOVORIN (Calcium salt of leucovorin), transferrin or ferritin.

[0513] In certain embodiments, the albumin fusion proteins and/or polynucleotides of the invention are administered in combination with agents used to treat psychiatric disorders. Psychiatric drugs that may be administered with the albumin fusion proteins and/or polynucleotides of the invention include, but are not limited to, antipsychotic agents (e.g., chlorpromazine, chlorprothixene, clozapine, fluphenazine, haloperidol, loxapine, mesoridazine, molindone, olanzapine, perphenazine, pimozide, quetiapine, risperidone, thioridazine, thiothixene, trifluoperazine, and triflupromazine), antimanic agents (e.g., carbamazepine, divalproex sodium, lithium carbonate, and lithium citrate), antidepressants (e.g., amitriptyline, amoxapine, bupropion, citalopram, clomipramine, desipramine, doxepin, fluvoxamine, fluoxetine, imipramine, isocarboxazid, maprotiline, mirtazapine, nefazodone, nortriptyline, paroxetine, phenelzine, protriptyline, sertraline, tranylcypromine, trazodone, trimipramine, and venlafaxine), antianxiety agents (e.g., alprazolam, buspirone, chlordiazepoxide, clorazepate, diazepam, halazepam, lorazepam, oxazepam, and prazepam), and stimulants (e.g., d-amphetamine, methylphenidate, and pemoline).

[0514] In other embodiments, the albumin fusion proteins and/or polynucleotides of the invention are administered in combination with agents used to treat neurological disorders. Neurological agents that may be administered with the albumin fusion proteins and/or polynucleotides of the invention include, but are not limited to, antiepileptic agents (e.g., carbamazepine, clonazepam, ethosuximide, phenobarbital, phenytoin, primidone, valproic acid, divalproex sodium, felbamate, gabapentin, lamotrigine, levetiracetam, oxcarbazepine, tiagabine, topiramate, zonisamide, diazepam, lorazepam, and clonazepam), antiparkinsonian agents (e.g., levodopa/carbidopa, selegiline, amantidine, bromocriptine, pergolide, ropinirole, pramipexole, benztropine; biperiden; ethopropazine; procyclidine; trihexyphenidyl, tolcapone), and ALS therapeutics (e.g. riluzole). In another embodiment, albumin fusion proteins and/or polynucleotides of the invention are administered in combination with vasodilating agents and/or calcium channel blocking agents. Vasodilating agents that may be administered with the albumin fusion proteins and/or polynucleotides of the invention include, but are not limited to, Angiotensin Converting Enzyme (ACE) inhibitors (e.g., papaverine, isoxsuprine, benazepril, captopril, cilazapril, enalapril, enalaprilat, fosinopril, lisinopril, moexipril, perindopril, quinapril, ramipril, spirapril, trandolapril, and nylidrin), and nitrates (e.g., isosorbide dinitrate, isosorbide mononitrate, and nitroglycerin). Examples of calcium channel blocking agents that may be administered in combination with the albumin fusion proteins and/or polynucleotides of the invention include, but are not limited to amlodipine, bepridil, diltiazem, felodipine, flunarizine, isradipine, nicardipine, nifedipine, nimodipine, and verapamil.

[0515] In certain embodiments, the albumin fusion proteins and/or polynucleotides of the invention are administered in combination with treatments for gastrointestinal disorders. Treatments for gastrointestinal disorders that may be administered with the albumin fusion protein and/or polynucleotide of the invention include, but are not limited to, H₂ histamine receptor antagonists (e.g., TAGAMET™ (cimetidine), ZANTAC™ (ranitidine), PEPCID™ (famotidine), and AXID™ (nizatidine)); inhibitors of H⁺, K⁺ ATPase (e.g., PREVACID™ (lansoprazole) and PRILOSEC™ (omeprazole)); Bismuth compounds (e.g., PEPTO-BISMOL™ (bismuth subsalicylate) and DE-NOL™ (bismuth subcitrate)); various antacids; sucralfate; prostaglandin analogs (e.g. CYTOTEC™ (misoprostol)); muscarinic cholinergic antagonists; laxatives (e.g., surfactant laxatives, stimulant laxatives, saline and osmotic laxatives); antidiarrheal agents (e.g., LOMOTIL™ (diphenoxylate), MOTOFEN™ (diphenoxin), and IMODIUM™ (loperamide hydrochloride)), synthetic analogs of somatostatin such as SANDOSTATIN™ (octreotide), antiemetic agents (e.g., ZOFRAN™ (ondansetron), KYTRIL™ (granisetron hydrochloride), tropisetron, dolasetron, metoclopramide, chlorpromazine, perphenazine, prochlorperazine, promethazine, thiethylperazine, triflupromazine, domperidone, haloperidol, droperidol, trimethobenzamide, dexamethasone, methylprednisolone, dronabinol, and nabilone); D2 antagonists (e.g., metoclopramide, trimethobenzamide and chlorpromazine); bile salts; chenodeoxycholic acid; ursodeoxycholic acid; and pancreatic enzyme preparations such as pancreatin and pancrelipase.

[0516] In additional embodiments, the albumin fusion proteins and/or polynucleotides of the invention are administered in combination with other therapeutic or prophylactic regimens, such as, for example, radiation therapy.

[0517] The invention also provides a pharmaceutical pack or kit comprising one or more containers filled with one or more of the ingredients of the pharmaceutical compositions comprising albumin fusion proteins of the invention. Optionally associated with such container(s) can be a notice in the form prescribed by a governmental agency regulating the manufacture, use or sale of pharmaceuticals or biological products, which notice reflects approval by the agency of manufacture, use or sale for human administration.

[0518] Gene Therapy

[0519] Constructs encoding albumin fusion proteins of the invention can be used as a part of a gene therapy protocol to deliver therapeutically effective doses of the albumin fusion protein. A preferred approach for in vivo introduction of nucleic acid into a cell is by use of a viral vector containing nucleic acid, encoding an albumin fusion protein of the invention. Infection of cells with a viral vector has the advantage that a large proportion of the targeted cells can receive the nucleic acid. Additionally, molecules encoded within the viral vector, e.g., by a cDNA contained in the viral vector, are expressed efficiently in cells which have taken up viral vector nucleic acid.

[0520] Retrovirus vectors and adeno-associated virus vectors can be used as a recombinant gene delivery system for the transfer of exogenous nucleic acid molecules encoding albumin fusion proteins in vivo. These vectors provide efficient delivery of nucleic acids into cells, and the transferred nucleic acids are stably integrated into the chromosomal DNA of the host. The development of specialized cell lines (termed “packaging cells”) which produce only replication-defective retroviruses has increased the utility of retroviruses for gene therapy, and defective retroviruses are characterized for use in gene transfer for gene therapy purposes (for a review see Miller, A. D. (1990) Blood 76:271). A replication defective retrovirus can be packaged into virions which can be used to infect a target cell through the use of a helper virus by standard techniques. Protocols for producing recombinant retroviruses and for infecting cells in vitro or in vivo with such viruses can be found in Current Protocols in Molecular Biology, Ausubel, F. M. et al., (eds.) Greene Publishing Associates, (1989), Sections 9.10-9.14 and other standard laboratory manuals.

[0521] Another viral gene delivery system useful in the present invention uses adenovirus-derived vectors. The genome of an adenovirus can be manipulated such that it encodes and expresses a gene product of interest but is inactivated in terms of its ability to replicate in a normal lytic viral life cycle. See, for example, Berkner et al., BioTechniques 6:616 (1988); Rosenfeld et al., Science 252:431-434 (1991); and Rosenfeld et al., Cell 68:143-155 (1992). Suitable adenoviral vectors derived from the adenovirus strain Ad type 5 d1324 or other strains of adenovirus (e.g., Ad2, Ad3, Ad7 etc.) are known to those skilled in the art. Recombinant adenoviruses can be advantageous in certain circumstances in that they are not capable of infecting nondividing cells and can be used to infect a wide variety of cell types, including epithelial cells (Rosenfeld et al., (1992) cited supra). Furthermore, the virus particle is relatively stable and amenable to purification and concentration, and as above, can be modified so as to affect the spectrum of infectivity. Additionally, introduced adenoviral DNA (and foreign DNA contained therein) is not integrated into the genome of a host cell but remains episomal, thereby avoiding potential problems that can occur as a result of insertional mutagenesis in situations where introduced DNA becomes integrated into the host genome (e.g., retroviral DNA). Moreover, the carrying capacity of the adenoviral genome for foreign DNA is large (up to 8 kilobases) relative to other gene delivery vectors (Berkner et al., cited supra; Haj-Ahmand et al., J. Virol. 57:267 (1986)).

[0522] In another embodiment, non-viral gene delivery systems of the present invention rely on endocytic pathways for the uptake of the subject nucleotide molecule by the targeted cell. Exemplary gene delivery systems of this type include liposomal derived systems, poly-lysine conjugates, and artificial viral envelopes. In a representative embodiment, a nucleic acid molecule encoding an albumin fusion protein of the invention can be entrapped in liposomes bearing positive charges on their surface (e.g., lipofectins) and (optionally) which are tagged with antibodies against cell surface antigens of the target tissue (Mizuno et al. (1992) No Shinkei Geka 20:547-551; PCT publication WO91/06309; Japanese patent application 1047381; and European patent publication EP-A-43075).

[0523] Gene delivery systems for a gene encoding an albumin fusion protein of the invention can be introduced into a patient by any of a number of methods. For instance, a pharmaceutical preparation of the gene delivery system can be introduced systemically, e.g. by intravenous injection, and specific transduction of the protein in the target cells occurs predominantly from specificity of transfection provided by the gene delivery vehicle, cell-type or tissue-type expression due to the transcriptional regulatory sequences controlling expression of the receptor gene, or a combination thereof. In other embodiments, initial delivery of the recombinant gene is more limited with introduction into the animal being quite localized. For example, the gene delivery vehicle can be introduced by catheter (see U.S. Pat. No. 5,328,470) or by Stereotactic injection (e.g. Chen et al. (1994) PNAS 91: 3054-3057). The pharmaceutical preparation of the gene therapy construct can consist essentially of the gene delivery system in an acceptable diluent, or can comprise a slow release matrix in which the gene delivery vehicle is imbedded. Where the albumin fusion protein can be produced intact from recombinant cells, e.g. retroviral vectors, the pharmaceutical preparation can comprise one or more cells which produce the albumin fusion protein.

[0524] Additional Gene Therapy Methods

[0525] Also encompassed by the invention are gene therapy methods for treating or preventing disorders, diseases and conditions. The gene therapy methods relate to the introduction of nucleic acid (DNA, RNA and antisense DNA or RNA) sequences into an animal to achieve expression of an albumin fusion protein of the invention. This method requires a polynucleotide which codes for an albumin fusion protein of the present invention operatively linked to a promoter and any other genetic elements necessary for the expression of the fusion protein by the target tissue. Such gene therapy and delivery techniques are known in the art, see, for example, WO90/11092, which is herein incorporated by reference.

[0526] Thus, for example, cells from a patient may be engineered with a polynucleotide (DNA or RNA) comprising a promoter operably linked to a polynucleotide encoding an albumin fusion protein of the present invention ex vivo, with the engineered cells then being provided to a patient to be treated with the fusion protein of the present invention. Such methods are well-known in the art. For example, see Belldegrun, A., et al., J. Natl. Cancer Inst. 85: 207-216 (1993); Ferrantini, M. et al., Cancer Research 53: 1107-1112 (1993); Ferrantini, M. et al., J. Immunology 153: 4604-4615 (1994); Kaido, T., et al., Int. J. Cancer 60: 221-229 (1995); Ogura, H., et al., Cancer Research 50: 5102-5106 (1990); Santodonato, L., et al., Human Gene Therapy 7:1-10 (1996); Santodonato, L., et al., Gene Therapy 4:1246-1255 (1997); and Zhang, J.-F. et al., Cancer Gene Therapy 3: 31-38 (1996)), which are herein incorporated by reference. In one embodiment, the cells which are engineered are arterial cells. The arterial cells may be reintroduced into the patient through direct injection to the artery, the tissues surrounding the artery, or through catheter injection.

[0527] As discussed in more detail below, the polynucleotide constructs can be delivered by any method that delivers injectable materials to the cells of an animal, such as, injection into the interstitial space of tissues (heart, muscle, skin, lung, liver, and the like). The polynucleotide constructs may be delivered in a pharmaceutically acceptable liquid or aqueous carrier.

[0528] In one embodiment, polynucleotides encoding the albumin fusion proteins of the present invention is delivered as a naked polynucleotide. The term “naked” polynucleotide, DNA or RNA refers to sequences that are free from any delivery vehicle that acts to assist, promote or facilitate entry into the cell, including viral sequences, viral particles, liposome formulations, lipofectin or precipitating agents and the like. However, polynucleotides encoding the albumin fusion proteins of the present invention can also be delivered in liposome formulations and lipofectin formulations and the like can be prepared by methods well known to those skilled in the art. Such methods are described, for example, in U.S. Pat. Nos. 5,593,972, 5,589,466, and 5,580,859, which are herein incorporated by reference.

[0529] The polynucleotide vector constructs used in the gene therapy method are preferably constructs that will not integrate into the host genome nor will they contain sequences that allow for replication. Appropriate vectors include pWLNEO, pSV2CAT, pOG44, pXT1 and pSG available from Stratagene; pSVK3, pBPV, pMSG and pSVL available from Pharmacia; and pEF1/V5, pcDNA3.1, and pRc/CMV2 available from Invitrogen. Other suitable vectors will be readily apparent to the skilled artisan.

[0530] Any strong promoter known to those skilled in the art can be used for driving the expression of the polynucleotide sequence. Suitable promoters include adenoviral promoters, such as the adenoviral major late promoter; or heterologous promoters, such as the cytomegalovirus (CMV) promoter; the respiratory syncytial virus (RSV) promoter; inducible promoters, such as the MMT promoter, the metallothionein promoter; heat shock promoters; the albumin promoter; the ApoAI promoter; human globin promoters; viral thymidine kinase promoters, such as the Herpes Simplex thymidine kinase promoter; retroviral LTRs; the b-actin promoter; and human growth hormone promoters. The promoter also may be the native promoter for the gene corresponding to the Therapeutic protein portion of the albumin fusion proteins of the invention.

[0531] Unlike other gene therapy techniques, one major advantage of introducing naked nucleic acid sequences into target cells is the transitory nature of the polynucleotide synthesis in the cells. Studies have shown that non-replicating DNA sequences can be introduced into cells to provide production of the desired polypeptide for periods of up to six months.

[0532] The polynucleotide construct can be delivered to the interstitial space of tissues within the an animal, including of muscle, skin, brain, lung, liver, spleen, bone marrow, thymus, heart, lymph, blood, bone, cartilage, pancreas, kidney, gall bladder, stomach, intestine, testis, ovary, uterus, rectum, nervous system, eye, gland, and connective tissue. Interstitial space of the tissues comprises the intercellular, fluid, mucopolysaccharide matrix among the reticular fibers of organ tissues, elastic fibers in the walls of vessels or chambers, collagen fibers of fibrous tissues, or that same matrix within connective tissue ensheathing muscle cells or in the lacunae of bone. It is similarly the space occupied by the plasma of the circulation and the lymph fluid of the lymphatic channels. Delivery to the interstitial space of muscle tissue is preferred for the reasons discussed below. They may be conveniently delivered by injection into the tissues comprising these cells. They are preferably delivered to and expressed in persistent, non-dividing cells which are differentiated, although delivery and expression may be achieved in non-differentiated or less completely differentiated cells, such as, for example, stem cells of blood or skin fibroblasts. In vivo muscle cells are particularly competent in their ability to take up and express polynucleotides.

[0533] For the naked nucleic acid sequence injection, an effective dosage amount of DNA or RNA will be in the range of from about 0.05 mg/kg body weight to about 50 mg/kg body weight. Preferably the dosage will be from about 0.005 mg/kg to about 20 mg/kg and more preferably from about 0.05 mg/kg to about 5 mg/kg. Of course, as the artisan of ordinary skill will appreciate, this dosage will vary according to the tissue site of injection. The appropriate and effective dosage of nucleic acid sequence can readily be determined by those of ordinary skill in the art and may depend on the condition being treated and the route of administration.

[0534] The preferred route of administration is by the parenteral route of injection into the interstitial space of tissues. However, other parenteral routes may also be used, such as, inhalation of an aerosol formulation particularly for delivery to lungs or bronchial tissues, throat or mucous membranes of the nose. In addition, naked DNA constructs can be delivered to arteries during angioplasty by the catheter used in the procedure.

[0535] The naked polynucleotides are delivered by any method known in the art, including, but not limited to, direct needle injection at the delivery site, intravenous injection, topical administration, catheter infusion, and so-called “gene guns”. These delivery methods are known in the art.

[0536] The constructs may also be delivered with delivery vehicles such as viral sequences, viral particles, liposome formulations, lipofectin, precipitating agents, etc. Such methods of delivery are known in the art.

[0537] In certain embodiments, the polynucleotide constructs are complexed in a liposome preparation. Liposomal preparations for use in the instant invention include cationic (positively charged), anionic (negatively charged) and neutral preparations. However, cationic liposomes are particularly preferred because a tight charge complex can be formed between the cationic liposome and the polyanionic nucleic acid. Cationic liposomes have been shown to mediate intracellular delivery of plasmid DNA (Felgner et al., Proc. Natl. Acad. Sci. USA (1987) 84:7413-7416, which is herein incorporated by reference); mRNA (Malone et al., Proc. Natl. Acad. Sci. USA (1989) 86:6077-6081, which is herein incorporated by reference); and purified transcription factors (Debs et al., J. Biol. Chem. (1990) 265:10189-10192, which is herein incorporated by reference), in functional form.

[0538] Cationic liposomes are readily available. For example, N[1-2,3-dioleyloxy)propyl]-N,N,N-triethylammonium (DOTMA) liposomes are particularly useful and are available under the trademark Lipofectin, from GIBCO BRL, Grand Island, N.Y. (See, also, Felgner et al., Proc. Natl. Acad. Sci. USA (1987) 84:7413-7416, which is herein incorporated by reference). Other commercially available liposomes include transfectace (DDAB/DOPE) and DOTAP/DOPE (Boehringer).

[0539] Other cationic liposomes can be prepared from readily available materials using techniques well known in the art. See, e.g. PCT Publication No. WO 90/11092 (which is herein incorporated by reference) for a description of the synthesis of DOTAP (1,2-bis(oleoyloxy)-3-(trimethylammonio)propane) liposomes. Preparation of DOTMA liposomes is explained in the literature, see, e.g., P. Felgner et al., Proc. Natl. Acad. Sci. USA 84:7413-7417, which is herein incorporated by reference. Similar methods can be used to prepare liposomes from other cationic lipid materials.

[0540] Similarly, anionic and neutral liposomes are readily available, such as from Avanti Polar Lipids (Birmingham, Ala.), or can be easily prepared using readily available materials. Such materials include phosphatidyl, choline, cholesterol, phosphatidyl ethanolamine, dioleoylphosphatidyl choline (DOPC), dioleoylphosphatidyl glycerol (DOPG), dioleoylphoshatidyl ethanolamine (DOPE), among others. These materials can also be mixed with the DOTMA and DOTAP starting materials in appropriate ratios. Methods for making liposomes using these materials are well known in the art.

[0541] For example, commercially dioleoylphosphatidyl choline (DOPC), dioleoylphosphatidyl glycerol (DOPG), and dioleoylphosphatidyl ethanolamine (DOPE) can be used in various combinations to make conventional liposomes, with or without the addition of cholesterol. Thus, for example, DOPG/DOPC vesicles can be prepared by drying 50 mg each of DOPG and DOPC under a stream of nitrogen gas into a sonication vial. The sample is placed under a vacuum pump overnight and is hydrated the following day with deionized water. The sample is then sonicated for 2 hours in a capped vial, using a Heat Systems model 350 sonicator equipped with an inverted cup (bath type) probe at the maximum setting while the bath is circulated at 15EC. Alternatively, negatively charged vesicles can be prepared without sonication to produce multilamellar vesicles or by extrusion through nucleopore membranes to produce unilamellar vesicles of discrete size. Other methods are known and available to those of skill in the art.

[0542] The liposomes can comprise multilamellar vesicles (MLVs), small unilamellar vesicles (SUVs), or large unilamellar vesicles (LUVs), with SUVs being preferred. The various liposome-nucleic acid complexes are prepared using methods well known in the art. See, e.g., Straubinger et al., Methods of Immunology (1983), 101:512-527, which is herein incorporated by reference. For example, MLVs containing nucleic acid can be prepared by depositing a thin film of phospholipid on the walls of a glass tube and subsequently hydrating with a solution of the material to be encapsulated. SUVs are prepared by extended sonication of MLVs to produce a homogeneous population of unilamellar liposomes. The material to be entrapped is added to a suspension of preformed MLVs and then sonicated. When using liposomes containing cationic lipids, the dried lipid film is resuspended in an appropriate solution such as sterile water or an isotonic buffer solution such as 10 mM Tris/NaCl, sonicated, and then the preformed liposomes are mixed directly with the DNA. The liposome and DNA form a very stable complex due to binding of the positively charged liposomes to the cationic DNA. SUVs find use with small nucleic acid fragments. LUVs are prepared by a number of methods, well known in the art. Commonly used methods include Ca²⁺-EDTA chelation (Papahadjopoulos et al., Biochim. Biophys. Acta (1975) 394:483; Wilson et al., Cell 17:77 (1979)); ether injection (Deamer, D. and Bangham, A., Biochim. Biophys. Acta 443:629 (1976); Ostro et al., Biochem. Biophys. Res. Commun. 76:836 (1977); Fraley et al., Proc. Natl. Acad. Sci. USA 76:3348 (1979)); detergent dialysis (Enoch, H. and Strittmatter, P., Proc. Natl. Acad. Sci. USA 76:145 (1979)); and reverse-phase evaporation (REV) (Fraley et al., J. Biol. Chem. 255:10431 (1980); Szoka, F. and Papahadjopoulos, D., Proc. Natl. Acad. Sci. USA 75:145 (1978); Schaefer-Ridder et al., Science 215:166 (1982)), which are herein incorporated by reference.

[0543] Generally, the ratio of DNA to liposomes will be from about 10:1 to about 1:10. Preferably, the ration will be from about 5:1 to about 1:5. More preferably, the ration will be about 3:1 to about 1:3. Still more preferably, the ratio will be about 1:1.

[0544] U.S. Pat. No. 5,676,954 (which is herein incorporated by reference) reports on the injection of genetic material, complexed with cationic liposomes carriers, into mice. U.S. Pat. Nos. 4,897,355, 4,946,787, 5,049,386, 5,459,127, 5,589,466, 5,693,622, 5,580,859, 5,703,055, and international publication no. WO 94/9469 (which are herein incorporated by reference) provide cationic lipids for use in transfecting DNA into cells and mammals. U.S. Pat. Nos. 5,589,466, 5,693,622, 5,580,859, 5,703,055, and international publication no. WO 94/9469 provide methods for delivering DNA-cationic lipid complexes to mammals.

[0545] In certain embodiments, cells are engineered, ex vivo or in vivo, using a retroviral particle containing RNA which comprises a sequence encoding an albumin fusion protein of the present invention. Retroviruses from which the retroviral plasmid vectors may be derived include, but are not limited to, Moloney Murine Leukemia Virus, spleen necrosis virus, Rous sarcoma Virus, Harvey Sarcoma Virus, avian leukosis virus, gibbon ape leukemia virus, human immunodeficiency virus, Myeloproliferative Sarcoma Virus, and mammary tumor virus.

[0546] The retroviral plasmid vector is employed to transduce packaging cell lines to form producer cell lines. Examples of packaging cells which may be transfected include, but are not limited to, the PE501, PA317, R-2, R-AM, PA12, T19-14X, VT-19-17-H2, RCRE, RCRIP, GP+E-86, GP+envAm12, and DAN cell lines as described in Miller, Human Gene Therapy 1:5-14 (1990), which is incorporated herein by reference in its entirety. The vector may transduce the packaging cells through any means known in the art. Such means include, but are not limited to, electroporation, the use of liposomes, and CaPO₄ precipitation. In one alternative, the retroviral plasmid vector may be encapsulated into a liposome, or coupled to a lipid, and then administered to a host.

[0547] The producer cell line generates infectious retroviral vector particles which include polynucleotide encoding an albumin fusion protein of the present invention. Such retroviral vector particles then may be employed, to transduce eukaryotic cells, either in vitro or in vivo. The transduced eukaryotic cells will express a fusion protin of the present invention.

[0548] In certain other embodiments, cells are engineered, ex vivo or in vivo, with polynucleotide contained in an adenovirus vector. Adenovirus can be manipulated such that it encodes and expresses fusion protein of the present invention, and at the same time is inactivated in terms of its ability to replicate in a normal lytic viral life cycle. Adenovirus expression is achieved without integration of the viral DNA into the host cell chromosome, thereby alleviating concerns about insertional mutagenesis. Furthermore, adenoviruses have been used as live enteric vaccines for many years with an excellent safety profile (Schwartz et al. Am. Rev. Respir. Dis. 109:233-238 (1974)). Finally, adenovirus mediated gene transfer has been demonstrated in a number of instances including transfer of alpha-1-antitrypsin and CFTR to the lungs of cotton rats (Rosenfeld, M. A. et al. (1991) Science 252:431-434; Rosenfeld et al., (1992) Cell 68:143-155). Furthermore, extensive studies to attempt to establish adenovirus as a causative agent in human cancer were uniformly negative (Green, M. et al. (1979) Proc. Natl. Acad. Sci. USA 76:6606).

[0549] Suitable adenoviral vectors useful in the present invention are described, for example, in Kozarsky and Wilson, Curr. Opin. Genet. Devel. 3:499-503 (1993); Rosenfeld et al., Cell 68:143-155 (1992); Engelhardt et al., Human Genet. Ther. 4:759-769 (1993); Yang et al., Nature Genet. 7:362-369 (1994); Wilson et al., Nature 365:691-692 (1993); and U.S. Pat. No. 5,652,224, which are herein incorporated by reference. For example, the adenovirus vector Ad2 is useful and can be grown in human 293 cells. These cells contain the E1 region of adenovirus and constitutively express E1a and E1b, which complement the defective adenoviruses by providing the products of the genes deleted from the vector. In addition to Ad2, other varieties of adenovirus (e.g., Ad3, Ad5, and Ad7) are also useful in the present invention.

[0550] Preferably, the adenoviruses used in the present invention are replication deficient. Replication deficient adenoviruses require the aid of a helper virus and/or packaging cell line to form infectious particles. The resulting virus is capable of infecting cells and can express a polynucleotide of interest which is operably linked to a promoter, but cannot replicate in most cells. Replication deficient adenoviruses may be deleted in one or more of all or a portion of the following genes: E1a, E1b, E3, E4, E2a, or L1 through L5.

[0551] In certain other embodiments, the cells are engineered, ex vivo or in vivo, using an adeno-associated virus (AAV). AAVs are naturally occurring defective viruses that require helper viruses to produce infectious particles (Muzyczka, N., Curr. Topics in Microbiol. Immunol. 158:97 (1992)). It is also one of the few viruses that may integrate its DNA into non-dividing cells. Vectors containing as little as 300 base pairs of AAV can be packaged and can integrate, but space for exogenous DNA is limited to about 4.5 kb. Methods for producing and using such AAVs are known in the art. See, for example, U.S. Pat. Nos. 5,139,941, 5,173,414, 5,354,678, 5,436,146, 5,474,935, 5,478,745, and 5,589,377.

[0552] For example, an appropriate AAV vector for use in the present invention will include all the sequences necessary for DNA replication, encapsidation, and host-cell integration. The polynucleotide construct is inserted into the AAV vector using standard cloning methods, such as those found in Sambrook et al., Molecular Cloning: A Laboratory Manual, Cold Spring Harbor Press (1989). The recombinant AAV vector is then transfected into packaging cells which are infected with a helper virus, using any standard technique, including lipofection, electroporation, calcium phosphate precipitation, etc. Appropriate helper viruses include adenoviruses, cytomegaloviruses, vaccinia viruses, or herpes viruses. Once the packaging cells are transfected and infected, they will produce infectious AAV viral particles which contain the polynucleotide construct. These viral particles are then used to transduce eukaryotic cells, either ex vivo or in vivo. The transduced cells will contain the polynucleotide construct integrated into its genome, and will express a fsuion protein of the invention.

[0553] Another method of gene therapy involves operably associating heterologous control regions and endogenous polynucleotide sequences (e.g. encoding a polypeptide of the present invention) via homologous recombination (see, e.g., U.S. Pat. No. 5,641,670, issued Jun. 24, 1997; International Publication No. WO 96/29411, published Sep. 26, 1996; International Publication No. WO 94/12650, published Aug. 4, 1994; Koller et al., Proc. Natl. Acad. Sci. USA 86:8932-8935 (1989); and Zijlstra et al., Nature 342:435-438 (1989), which are herein encorporated by reference. This method involves the activation of a gene which is present in the target cells, but which is not normally expressed in the cells, or is expressed at a lower level than desired.

[0554] Polynucleotide constructs are made, using standard techniques known in the art, which contain the promoter with targeting sequences flanking the promoter. Suitable promoters are described herein. The targeting sequence is sufficiently complementary to an endogenous sequence to permit homologous recombination of the promoter-targeting sequence with the endogenous sequence. The targeting sequence will be sufficiently near the 5′ end of the desired endogenous polynucleotide sequence so the promoter will be operably linked to the endogenous sequence upon homologous recombination.

[0555] The promoter and the targeting sequences can be amplified using PCR. Preferably, the amplified promoter contains distinct restriction enzyme sites on the 5′ and 3′ ends. Preferably, the 3′ end of the first targeting sequence contains the same restriction enzyme site as the 5′ end of the amplified promoter and the 5′ end of the second targeting sequence contains the same restriction site as the 3′ end of the amplified promoter. The amplified promoter and targeting sequences are digested and ligated together.

[0556] The promoter-targeting sequence construct is delivered to the cells, either as naked polynucleotide, or in conjunction with transfection-facilitating agents, such as liposomes, viral sequences, viral particles, whole viruses, lipofection, precipitating agents, etc., described in more detail above. The P promoter-targeting sequence can be delivered by any method, included direct needle injection, intravenous injection, topical administration, catheter infusion, particle accelerators, etc. The methods are described in more detail below.

[0557] The promoter-targeting sequence construct is taken up by cells. Homologous recombination between the construct and the endogenous sequence takes place, such that an endogenous sequence is placed under the control of the promoter. The promoter then drives the expression of the endogenous sequence.

[0558] The polynucleotide encoding an albumin fusion protein of the present invention may contain a secretory signal sequence that facilitates secretion of the protein. Typically, the signal sequence is positioned in the coding region of the polynucleotide to be expressed towards or at the 5′ end of the coding region. The signal sequence may be homologous or heterologous to the polynucleotide of interest and may be homologous or heterologous to the cells to be transfected. Additionally, the signal sequence may be chemically synthesized using methods known in the art.

[0559] Any mode of administration of any of the above-described polynucleotides constructs can be used so long as the mode results in the expression of one or more molecules in an amount sufficient to provide a therapeutic effect. This includes direct needle injection, systemic injection, catheter infusion, biolistic injectors, particle accelerators (i.e., “gene guns”), gelfoam sponge depots, other commercially available depot materials, osmotic pumps (e.g., Alza minipumps), oral or suppositorial solid (tablet or pill) pharmaceutical formulations, and decanting or topical applications during surgery. For example, direct injection of naked calcium phosphate-precipitated plasmid into rat liver and rat spleen or a protein-coated plasmid into the portal vein has resulted in gene expression of the foreign gene in the rat livers (Kaneda et al., Science 243:375 (1989)).

[0560] A preferred method of local administration is by direct injection. Preferably, an albumin fusion protein of the present invention complexed with a delivery vehicle is administered by direct injection into or locally within the area of arteries. Administration of a composition locally within the area of arteries refers to injecting the composition centimeters and preferably, millimeters within arteries.

[0561] Another method of local administration is to contact a polynucleotide construct of the present invention in or around a surgical wound. For example, a patient can undergo surgery and the polynucleotide construct can be coated on the surface of tissue inside the wound or the construct can be injected into areas of tissue inside the wound.

[0562] Therapeutic compositions useful in systemic administration, include fusion proteins of the present invention complexed to a targeted delivery vehicle of the present invention. Suitable delivery vehicles for use with systemic administration comprise liposomes comprising ligands for targeting the vehicle to a particular site. In specific embodiments, suitable delivery vehicles for use with systemic administration comprise liposomes comprising albumin fusion proteins of the invention for targeting the vehicle to a particular site.

[0563] Preferred methods of systemic administration, include intravenous injection, aerosol, oral and percutaneous (topical) delivery. Intravenous injections can be performed using methods standard in the art. Aerosol delivery can also be performed using methods standard in the art (see, for example, Stribling et al., Proc. Natl. Acad. Sci. USA 189:11277-11281, 1992, which is incorporated herein by reference). Oral delivery can be performed by complexing a polynucleotide construct of the present invention to a carrier capable of withstanding degradation by digestive enzymes in the gut of an animal. Examples of such carriers, include plastic capsules or tablets, such as those known in the art. Topical delivery can be performed by mixing a polynucleotide construct of the present invention with a lipophilic reagent (e.g., DMSO) that is capable of passing into the skin.

[0564] Determining an effective amount of substance to be delivered can depend upon a number of factors including, for example, the chemical structure and biological activity of the substance, the age and weight of the animal, the precise condition requiring treatment and its severity, and the route of administration. The frequency of treatments depends upon a number of factors, such as the amount of polynucleotide constructs administered per dose, as well as the health and history of the subject. The precise amount, number of doses, and timing of doses will be determined by the attending physician or veterinarian.

[0565] Albumin fusion proteins of the present invention can be administered to any animal, preferably to mammals and birds. Preferred mammals include humans, dogs, cats, mice, rats, rabbits sheep, cattle, horses and pigs, with humans being particularly preferred.

[0566] Biological Activities

[0567] Albumin fusion proteins and/or polynucleotides encoding albumin fusion proteins of the present invention, can be used in assays to test for one or more biological activities. If an albumin fusion protein and/or polynucleotide exhibits an activity in a particular assay, it is likely that the Therapeutic protein corresponding to the fusion portein may be involved in the diseases associated with the biological activity. Thus, the fusion protein could be used to treat the associated disease.

[0568] Members of the secreted family of proteins are believed to be involved in biological activities associated with, for example, cellular signaling. Accordingly, albumin fusion proteins of the invention and polynucleotides encoding these protiens, may be used in diagnosis, prognosis, prevention and/or treatment of diseases and/or disorders associated with aberrant activity of secreted polypeptides.

[0569] In preferred embodiments, fusion proteins of the present invention may be used in the diagnosis, prognosis, prevention and/or treatment of diseases and/or disorders relating to diseases and disorders of the endocrine system, the nervous system (See, for example, “Neurological Disorders” section below), and the immune system (See, for example, “Immune Activity” section below), respiratory system (See, for example, “Respiratory Disorders” section below), cardiovascular system (See, for example, “Cardiovascular Disorders” section below), reproductive system (See, for example, “Reproductive System Disorders” section below) digestive system (See, for example, “Gastrointestinal Disorders” section below), diseases and/or disorders relating to cell proliferation (See, for example, “Hyperproliferative Disorders” section below), and/or diseases or disorders relating to the blood ((See, for example, “Blood-Related Disorders” section below).

[0570] In preferred embodiments, the present invention encompasses a method of treating a disease or disorder listed in the “Preferred Indication Y” column of Table 1 comprising administering to a patient in which such treatment, prevention or amelioration is desired an albumin fusion protein of the invention that comprises a Therapeutic protein portion corresponding to a Therapeutic protein disclosed in the “Therapeutic Protein X” column of Table 1 (in the same row as the disease or disorder to be treated is listed in the “Preferred Indication Y” column of Table 1) in an amount effective to treat, prevent or ameliorate the disease or disorder.

[0571] In certain embodiments, a Therapeutic protein having a “Cancer” recitation in the “Preferred Indication” column of Table 1, an albumin fusion protein that comprises a Therapeutic protein portion corresponding to a Therapeutic protein, and fragments and variants thereof, may be used to treat a disease and/or disorder relating to a neoplastic disease (e.g., leukemia, cancer, and/or as described below under “Hyperproliferative Disorders”).

[0572] In additional embodiments, a Therapeutic protein having a “Cancer” recitation in the “Preferred Indication” column of Table 1, an albumin fusion protein that comprises a Therapeutic protein portion corresponding to this Therapeutic protein, and fragments and variants thereof, may be used to treat a neoplasm located in a tissue selected from the group consisting of: colon, abdomen, bone, breast, digestive system, liver, pancreas, prostate, peritoneum, lung, blood (e.g., leukemia), endocrine glands (adrenal, parathyroid, pituitary, testicles, ovary, thymus, thyroid), uterus, eye, head and neck, nervous (central and peripheral), lymphatic system, pelvic, skin, soft tissue, spleen, thoracic, and urogenital.

[0573] In other embodiments, a Therapeutic protein having a “Cancer” recitation in the “Preferred Indication” column of Table 1, an albumin fusion protein that comprises a Therapeutic protein portion corresponding to this Therapeutic protein, and fragments and variants thereof, may be used to treat a pre-neoplastic condition, selected from the group consisting of: hyperplasia (e.g., endometrial hyperplasia and/or as described in the section entitled “Hyperproliferative Disorders”), metaplasia (e.g., connective tissue metaplasia, a typical metaplasia, and/or as described in the section entitled “Hyperproliferative Disorders”), and dysplasia (e.g., cervical dysplasia, and bronchopulmonary dysplasia).

[0574] In additional embodiments, a Therapeutic protein having a “Cancer” recitation in the “Preferred Indication” column of Table 1, an albumin fusion protein that comprises a Therapeutic protein portion corresponding to this Therapeutic protein, and fragments and variants thereof, may be used to treat a benign dysproliferative disorder selected from the group consisting of: benign tumors, fibrocystic conditions, tissue hypertrophy, and/or as described in the section entitled “Hyperproliferative Disorders”.

[0575] In certain embodiments, a Therapeutic protein having a “Immune/Hematopoietic” recitation in the “Preferred Indication” column of Table 1, an albumin fusion protein that comprises a Therapeutic protein portion corresponding to this Therapeutic protein, and fragments and variants thereof, may be used to treat a disease and/or disorder relating to a neoplastic disease (e.g., as described below under “Hyperproliferative Disorders”), a blood disorder (e.g., as described below under “Immune Activity”, “Cardiovascular Disorders” and/or “Blood-Related Disorders”), and/or an infection (e.g., as described below under “Infectious Disease”).

[0576] In additional embodiments, a Therapeutic protein having a “Immune/Hematopoietic” recitation in the “Preferred Indication” column of Table 1, an albumin fusion protein that comprises a Therapeutic protein portion corresponding to this Therapeutic protein, and fragments and variants thereof, may be used to treat a disease and/or disorder selected from the group consisting of: anemia, pancytopenia, leukopenia, thrombocytopenia, leukemias, Hodgkin's disease, non-Hodgkin's lymphoma, acute lymphocytic anemia (ALL), plasmacytomas, multiple myeloma, Burkitt's lymphoma, arthritis, asthma, AIDS, autoimmune disease, rheumatoid arthritis, granulomatous disease, immune deficiency, inflammatory bowel disease, sepsis, neutropenia, neutrophilia, psoriasis, an immune reaction to a transplanted organ and/or tissue, systemic lupus erythematosis, hemophilia, hypercoagulation, diabetes mellitus, endocarditis, meningitis, Lyme Disease, and allergies.

[0577] In other embodiments, a Therapeutic protein having a “Reproductive” recitation in the “Preferred Indication” column of Table 1, an albumin fusion protein that comprises a Therapeutic protein portion corresponding to this Therapeutic protein, and fragments and variants thereof, may be used to treat a disease and/or disorder relating to a neoplastic disease (e.g., as described below under “Hyperproliferative Disorders”), and/or a disorder of the reproductive system (e.g., as described below under “Reproductive System Disorders”).

[0578] In additional embodiments, a Therapeutic protein having a “Reproductive” recitation in the “Preferred Indication” column of Table 1, an albumin fusion protein that comprises a Therapeutic protein portion corresponding to this Therapeutic protein, and fragments and variants thereof, may be used to treat a disease and/or disorder selected from the group consisting of: cryptorchism, prostatitis, inguinal hernia, varicocele, a leydig cell tumor, verrucous carcinoma, prostatitis, malacoplakia, Peyronie's disease, penile carcinoma, squamous cell hyperplasia, dysmenorrhea, ovarian adenocarcinoma, Turner's syndrome, mucopurulent cervicitis, a Sertoli-leydig tumor, ovarian cancer, uterine cancer, pelvic inflammatory disease, testicular cancer, prostate cancer, Klinefelter's syndrome, Young's syndrome, premature ejaculation, diabetes mellitus, cystic fibrosis, Kartagener's syndrome, testicular atrophy, testicular feminization, anorchia, ectopic testis, epididymitis, orchitis, gonorrhea, syphilis, testicular torsion, vasitis nodosa, a germ cell tumor, a stromal tumor, dysmenorrhea, retroverted uterus, endometriosis, fibroids, adenomyosis, anovulatory bleeding, amenorrhea, Cushing's syndrome, a hydatidiform mole, Asherman's syndrome, premature menopause, precocious puberty, uterine polyps, dysfunctional uterine bleeding, cervicitis, chronic cervicitis, mucopurulent cervicitis, cervical dysplasia, cervical polyps, Nabothian cysts, cervical erosion, cervical incompetence, a cervical neoplasm, pseudohermaphroditism, and premenstrual syndrome.

[0579] In other embodiments, a Therapeutic protein having a “Musculoskeletal” recitation in the “Preferred Indication” column of Table 1, an albumin fusion protein that comprises a Therapeutic protein portion corresponding to this Therapeutic protein, and fragments and variants thereof, may be used to treat a disease and/or disorder relating to a neoplastic disease (e.g., as described below under “Hyperproliferative Disorders”), and/or a disorder of the immune system (e.g., as described below under “Immune Activity”).

[0580] In further embodiments, a Therapeutic protein having a “Musculoskeletal” recitation in the “Preferred Indication” column of Table 1, an albumin fusion protein that comprises a Therapeutic protein portion corresponding to this Therapeutic protein, and fragments and variants thereof, may be used to treat a disease and/or disorder selected from the group consisting of bone cancer (e.g., osteochondroma, benign chondroma, chondroblastoma, chondromyxoid fibroma, osteoid osteoma, giant cell tumor, multiple myeloma, and osteosarcoma), Paget's Disease, rheumatoid arthritis, systemic lupus erythematosus, osteomyelitis, Lyme Disease, gout, bursitis, tendonitis, osteoporosis, osteoarthritis, muscular dystrophy, mitochondrial myopathy, cachexia, and multiple sclerosis.

[0581] In other embodiments, a Therapeutic protein having a “Cardiovascular” recitation in the “Preferred Indication” column of Table 1, an albumin fusion protein that comprises a Therapeutic protein portion corresponding to this Therapeutic protein, and fragments and variants thereof, may be used to treat a disease and/or disorder relating to a neoplastic disease (e.g., as described below under “Hyperproliferative Disorders”), and/or a disorder of the cardiovascular system (e.g., as described below under “Cardiovascular Disorders”).

[0582] In additional embodiments, a Therapeutic protein having a “Cardiovascular” recitation in the “Preferred Indication” column of Table 1, an albumin fusion protein that comprises a Therapeutic protein portion corresponding to this Therapeutic protein, and fragments and variants thereof, may be used to treat a disease and/or disorder selected from the group consisting of: myxoma, fibroma, rhabdomyoma, cardiovascular abnormality (e.g., a congenital heart defect, cerebral arterioyenous malformation, septal defect), heart disease (e.g., heart failure, congestive heart disease, arrhythmia, tachycardia, fibrillation, pericardial Disease, endocarditis), cardiac arrest, heart valve disease (e.g., stenosis, regurgitation, prolapse), vascular disease (e.g., hypertension, coronary artery disease, angina, aneurysm, arteriosclerosis, peripheral vascular disease), hyponatremia, hypernatremia, hypokalemia, and hyperkalemia.

[0583] In other embodiments, a Therapeutic protein having a “Mixed Fetal” recitation in the “Preferred Indication” column of Table 1, an albumin fusion protein that comprises a Therapeutic protein portion corresponding to this Therapeutic protein, and fragments and variants thereof, may be used to treat a disease and/or disorder relating to a neoplastic disease (e.g., as described below under “Hyperproliferative Disorders”).

[0584] In further embodiments, a Therapeutic protein having a “Mixed Fetal” recitation in the “Preferred Indication” column of Table 1, an albumin fusion protein that comprises a Therapeutic protein portion corresponding to this Therapeutic protein, and fragments and variants thereof, may be used to treat a disease and/or disorder selected from the group consisting of: spina bifida, hydranencephaly, neurofibromatosis, fetal alcohol syndrome, diabetes mellitus, PKU, Down's syndrome, Patau syndrome, Edwards syndrome, Turner syndrome, Apert syndrome, Carpenter syndrome, Conradi syndrome, Crouzon syndrome, cutis laxa, Cornelia de Lange syndrome, Ellis-van Creveld syndrome, Holt-Oram syndrome, Kartagener syndrome, Meckel-Gruber syndrome, Noonan syndrome, Pallister-Hall syndrome, Rubinstein-Taybi syndrome, Scimitar syndrome, Smith-Lemli-Opitz syndrome, thromocytopenia-absent radius (TAR) syndrome, Treacher Collins syndrome, Williams syndrome, Hirschsprung's disease, Meckel's diverticulum, polycystic kidney disease, Turner's syndrome, and gonadal dysgenesis, Klippel-Feil syndrome, Ostogenesis imperfecta, muscular dystrophy, Tay-Sachs disease, Wilm's tumor, neuroblastoma, and retinoblastoma.

[0585] In further embodiments, a Therapeutic protein having a “Excretory” recitation in the “Preferred Indication” column of Table 1, an albumin fusion protein that comprises a Therapeutic protein portion corresponding to this Therapeutic protein, and fragments and variants thereof, may be used to treat a disease and/or disorder relating to a neoplastic disease (e.g., as described below under “Hyperproliferative Disorders”) and/or a renal disorder (e.g., as described below under “Renal Disorders”).

[0586] In other embodiments, a Therapeutic protein having a “Excretory” recitation in the “Preferred Indication” column of Table 1, an albumin fusion protein that comprises a Therapeutic protein portion corresponding to this Therapeutic protein, and fragments and variants thereof, may be used to treat a disease and/or disorder selected from the group consisting of: bladder cancer, prostate cancer, benign prostatic hyperplasia, bladder disorders (e.g., urinary incontinence, urinary retention, urinary obstruction, urinary tract Infections, interstitial cystitis, prostatitis, neurogenic bladder, hematuria), a renal disorder (e.g., hydronephrosis, proteinuria, renal failure, pyelonephritis, urolithiasis, reflux nephropathy, and unilateral obstructive uropathy).

[0587] In further embodiments, a Therapeutic protein having a “Neural/Sensory” recitation in the “Preferred Indication” column of Table 1, an albumin fusion protein that comprises a Therapeutic protein portion corresponding to this Therapeutic protein, and fragments and variants thereof, may be used to treat a disease and/or disorder relating to a neoplastic disease (e.g., as described below under “Hyperproliferative Disorders”) and/or a disease or disorder of the nervous system (e.g., as described below under “Neural Activity and Neurological Diseases”).

[0588] In other embodiments, a Therapeutic protein having a “Neural/Sensory” recitation in the “Preferred Indication” column of Table 1, an albumin fusion protein that comprises a Therapeutic protein portion corresponding to this Therapeutic protein, and fragments and variants thereof, may be used to treat a disease and/or disorder selected from the group consisting of: brain cancer (e.g., brain stem glioma, brain tumor, central nervous system (Primary) lymphoma, central nervous system lymphoma, cerebellar astrocytoma, and cerebral astrocytoma, a neurodegenerative disorder (e.g., Alzheimer's Disease, Creutzfeldt-Jakob Disease, Parkinson's Disease, and Idiopathic Presenile Dementia), encephalomyelitis, cerebral malaria, meningitis, a metabolic brain disease (e.g., phenylketonuria and pyruvate carboxylase deficiency), cerebellar ataxia, ataxia telangiectasia, and AIDS Dementia Complex, schizophrenia, attention deficit disorder, hyperactive attention deficit disorder, autism, and an obsessive compulsive disorder.

[0589] In other embodiments, a Therapeutic protein having a “Respiratory” recitation in the “Preferred Indication” column of Table 1, an albumin fusion protein that comprises a Therapeutic protein portion corresponding to this Therapeutic protein, and fragments and variants thereof, may be used to treat a disease and/or disorder relating to a neoplastic disease (e.g., as described below under “Hyperproliferative Disorders”) and/or a disease or disorder of the respiratory system (e.g., as described below under “Respiratory Disorders”).

[0590] In other embodiments, a Therapeutic protein having a “Respiratory” recitation in the “Preferred Indication” column of Table 1, an albumin fusion protein that comprises a Therapeutic protein portion corresponding to this Therapeutic protein, and fragments and variants thereof, may be used to treat a disease and/or disorder selected from the group consisting of: a cancer of the respiratory system (such as larynx cancer, pharynx cancer, trachea cancer, epiglottis cancer, lung cancer, squamous cell carcinoma, small cell (oat cell) carcinoma, large cell carcinoma, and adenocarcinoma), an allergic reaction, cystic fibrosis, sarcoidosis, histiocytosis X, an infiltrative lung disease (e.g., pulmonary fibrosis and lymphoid interstitial pneumonia), an obstructive airway disease (e.g., asthma, emphysema, chronic or acute bronchitis), an occupational lung disease (e.g., silicosis and asbestosis), pneumonia, and pleurisy.

[0591] In other embodiments, a Therapeutic protein having an “Endocrine” recitation in the “Preferred Indication” column of Table 1, an albumin fusion protein that comprises a Therapeutic protein portion corresponding to this Therapeutic protein, and fragments and variants thereof, may be used to treat a disease and/or disorder relating to a neoplastic disease (e.g., as described below under “Hyperproliferative Disorders”), a disease or disorder of the respiratory system (e.g., as described below under “Respiratory Disorders”), a renal disorder (e.g., as described below under “Renal Disorders”), and/or a disorder of the endocrine system (e.g., as described below under “Endocrine Disorders”).

[0592] In other embodiments, a Therapeutic protein having a “Endocrine” recitation in the “Preferred Indication” column of Table 1, an albumin fusion protein that comprises a Therapeutic protein portion corresponding to this Therapeutic protein, and fragments and variants thereof, may be used to treat a disease and/or disorder selected from the group consisting of: a cancer of endocrine tissues and/or organs (e.g., cancer of the hypothalamus, pituitary gland, thyroid gland, parathyroid glands, pancreas, adrenal glands, ovaries, and testes), diabetes (e.g., diabetes insipidus, type I and type II diabetes mellitus), obesity, a disorder related to pituitary glands (e.g., hyperpituitarism, hypopituitarism, and pituitary dwarfism), hypothyroidism, hyperthyroidism, goiter, reproductive disorders (e.g. male and female infertility), a disorder related to adrenal glands (e.g., Addison's Disease, corticosteroid deficiency, and Cushing's Syndrome), kidney cancer (e.g., hypemephroma, transitional cell cancer, and Wilm's tumor), diabetic nephropathy, interstitial nephritis, polycystic kidney disease, glomerulonephritis (e.g., IgM mesangial proliferative glomerulonephritis and glomerulonephritis caused by an autoimmune disorder; such as Goodpasture's syndrome), and nephrocalcinosis.

[0593] In additional embodiments, a Therapeutic protein having a “Digestive” recitation in the “Preferred Indication” column of Table 1, an albumin fusion protein that comprises a Therapeutic protein portion corresponding to this Therapeutic protein, and fragments and variants thereof, may be used to treat a disease and/or disorder relating to, for example, a neoplastic disease (e.g., as described below under “Hyperproliferative Disorders”) and/or a disease or disorder of the gastrointestinal system (e.g., as described below under “Gastrointestinal Disorders”).

[0594] In other embodiments, a Therapeutic protein having a “Digestive” recitation in the “Preferred Indication” column of Table 1, an albumin fusion protein that comprises a Therapeutic protein portion corresponding to this Therapeutic protein, and fragments and variants thereof, may be used to treat a disease and/or disorder selected from the group consisting of: ulcerative colitis, appendicitis, Crohn's disease, hepatitis, hepatic encephalopathy, portal hypertension, cholelithiasis, cancer of the digestive system (e.g., biliary tract cancer, stomach cancer, colon cancer, gastric cancer, pancreatic cancer, cancer of the bile duct, a tumor of the colon (e.g., polyps or cancers), and cirrhosis), pancreatitis, ulcerative disease, pyloric stenosis, gastroenteritis, gastritis, gastric atropy, a benign tumor of the duodenum, distension, irritable bowel syndrome, malabsorption, a congenital disorder of the small intestine, bacterial and parasitic infection, megacolon, Hirschsprung's disease, aganglionic megacolon, acquired megacolon, colitis, a anorectal disorder (e.g., anal fistulas, hemorrhoids), a congenital disorder of the liver (e.g., Wilson's disease, hemochromatosis, cystic fibrosis, biliary atresia, and alpha1-antitrypsin deficiency), portal hypertension, cholelithiasis, and jaundice.

[0595] In further embodiments, a Therapeutic protein having a “Connective/Epithelial” recitation in the “Preferred Indication” column of Table 1, an albumin fusion protein that comprises a Therapeutic protein portion corresponding to this Therapeutic protein, and fragments and variants thereof, may be used to treat a disease and/or disorder relating to a neoplastic disease (e.g., as described below under “Hyperproliferative Disorders”), a cellular and/or genetic abnormality (e.g., as described below under “Diseases at the Cellular Level”), angiogenesis (e.g., as described below under “Anti-Angiogenesis Activity”), and/or to promote or inhibit regeneration (e.g., as described below under “Regeneration”), and/or wound healing (e.g., as described below under “Wound Healing and Epithelial Cell Proliferation”).

[0596] In certain embodiments, a Therapeutic protein having a “Connective/Epithelial” recitation in the “Preferred Indication” column of Table 1, an albumin fusion protein that comprises a Therapeutic protein portion corresponding to this Therapeutic protein, and fragments and variants thereof, may be used to treat a disease and/or disorder selected from the group consisting of: connective tissue metaplasia, mixed connective tissue disease, focal epithelial hyperplasia, epithelial metaplasia, mucoepithelial dysplasia, graft v. host disease, polymyositis, cystic hyperplasia, cerebral dysplasia, tissue hypertrophy, Alzheimer's disease, lymphoproliferative disorder, Waldenstron's macroglobulinemia, Crohn's disease, pernicious anemia, idiopathic Addison's disease, glomerulonephritis, bullous pemphigoid, Sjogren's syndrome, diabetes mellitus, cystic fibrosis, osteoblastoma, osteoclastoma, osteosarcoma, chondrosarcoma, osteoporosis, osteocarthritis, periodontal disease, wound healing, relapsing polychondritis, vasculitis, polyarteritis nodosa, Wegener's granulomatosis, cellulitis, rheumatoid arthritis, psoriatic arthritis, discoid lupus erythematosus, systemic lupus erythematosus, scleroderma, CREST syndrome, Sjogren's syndrome, polymyositis, dermatomyositis, mixed connective tissue disease, relapsing polychondritis, vasculitis, Henoch-Schonlein syndrome, erythema nodosum, polyarteritis nodosa, temporal (giant cell) arteritis, Takayasu's arteritis, Wegener's granulomatosis, Reiter's syndrome, Behcet's syndrome, ankylosing spondylitis, cellulitis, keloids, Ehler Danlos syndrome, Marfan syndrome, pseudoxantoma elasticum, osteogenese imperfecta, chondrodysplasias, epidermolysis bullosa, Alport syndrome, and cutis laxa.

[0597] In certain embodiments, an albumin fusion protein of the present invention may be used to diagnose and/or prognose diseases and/or disorders associated with the tissue(s) in which the gene corresponding to the Therapeutic protein portion of the fusion portien of the invention is expressed.

[0598] Thus, fusion proteins of the invention and polynucleotides encoding albumin fusion proteins of the invention are useful in the diagnosis, detection and/or treatment of diseases and/or disorders associated with activities that include, but are not limited to, prohormone activation, neurotransmitter activity, cellular signaling, cellular proliferation, cellular differentiation, and cell migration.

[0599] More generally, fusion proteins of the invention and polynucleotides encoding albumin fusion proteins of the invention may be useful for the diagnosis, prognosis, prevention and/or treatment of diseases and/or disorders associated with the following systems.

[0600] Immune Activity

[0601] Albumin fusion proteins of the invention and polynucleotides encoding albumin fusion proteins of the invention may be useful in treating, preventing, diagnosing and/or prognosing diseases, disorders, and/or conditions of the immune system, by, for example, activating or inhibiting the proliferation, differentiation, or mobilization (chemotaxis) of immune cells. Immune cells develop through a process called hematopoiesis, producing myeloid (platelets, red blood cells, neutrophils, and macrophages) and lymphoid (B and T lymphocytes) cells from pluripotent stem cells. The etiology of these immune diseases, disorders, and/or conditions may be genetic, somatic, such as cancer and some autoimmune diseases, acquired (e.g., by chemotherapy or toxins), or infectious. Moreover, fusion proteins of the invention and/or polynucleotides encoding albumin fusion proteins of the invention can be used as a marker or detector of a particular immune system disease or disorder.

[0602] In another embodiment, a fusion protein of the invention and/or polynucleotide encoding an albumin fusion protein of the invention, may be used to treat diseases and disorders of the immune system and/or to inhibit or enhance an immune response generated by cells associated with the tissue(s) in which the polypeptide of the invention is expressed.

[0603] Albumin fusion proteins of the invention and/or polynucleotides encoding albumin fusion proteins of the invention may be useful in treating, preventing, diagnosing, and/or prognosing immunodeficiencies, including both congenital and acquired immunodeficiencies. Examples of B cell immunodeficiencies in which immunoglobulin levels B cell function and/or B cell numbers are decreased include: X-linked agammaglobulinemia (Bruton's disease), X-linked infantile agammaglobulinemia, X-linked immunodeficiency with hyper IgM, non X-linked immunodeficiency with hyper IgM, X-linked lymphoproliferative syndrome (XLP), agammaglobulinemia including congenital and acquired agammaglobulinemia, adult onset agammaglobulinemia, late-onset agammaglobulinemia, dysgammaglobulinemia, hypogammaglobulinemia, unspecified hypogammaglobulinemia, recessive agammaglobulinemia (Swiss type), Selective IgM deficiency, selective IgA deficiency, selective IgG subclass deficiencies, IgG subclass deficiency (with or without IgA deficiency), Ig deficiency with increased IgM, IgG and IgA deficiency with increased IgM, antibody deficiency with normal or elevated Igs, Ig heavy chain deletions, kappa chain deficiency, B cell lymphoproliferative disorder (BLPD), common variable immunodeficiency (CVID), common variable immunodeficiency (CVI) (acquired), and transient hypogammaglobulinemia of infancy.

[0604] In specific embodiments, ataxia-telangiectasia or conditions associated with ataxia-telangiectasia are treated, prevented, diagnosed, and/or prognosing using the, fusion proteins of the invention and/or polynucleotides encoding albumin fusion proteins of the invention.

[0605] Examples of congenital immunodeficiencies in which T cell and/or B cell function and/or number is decreased include, but are not limited to: DiGeorge anomaly, severe combined immunodeficiencies (SCID) (including, but not limited to, X-linked SCID, autosomal recessive SCID, adenosine deaminase deficiency, purine nucleoside phosphorylase (PNP) deficiency, Class II MHC deficiency (Bare lymphocyte syndrome), Wiskott-Aldrich syndrome, and ataxia telangiectasia), thymic hypoplasia, third and fourth pharyngeal pouch syndrome, 22q11.2 deletion, chronic mucocutaneous candidiasis, natural killer cell deficiency (NK), idiopathic CD4+ T-lymphocytopenia, immunodeficiency with predominant T cell defect (unspecified), and unspecified immunodeficiency of cell mediated immunity.

[0606] In specific embodiments, DiGeorge anomaly or conditions associated with DiGeorge anomaly are treated, prevented, diagnosed, and/or prognosed using fusion proteins of the invention and/or polynucleotides encoding albumin fusion proteins of the invention.

[0607] Other immunodeficiencies that may be treated, prevented, diagnosed, and/or prognosed using fusion proteins of the invention and/or polynucleotides encoding albumin fusion proteins of the invention, include, but are not limited to, chronic granulomatous disease, Chédiak-Higashi syndrome, myeloperoxidase deficiency, leukocyte glucose-6-phosphate dehydrogenase deficiency, X-linked lymphoproliferative syndrome (XLP), leukocyte adhesion deficiency, complement component deficiencies (including C1, C2, C3, C4, C5, C6, C7, C8 and/or C9 deficiencies), reticular dysgenesis, thymic alymphoplasia-aplasia, immunodeficiency with thymoma, severe congenital leukopenia, dysplasia with immunodeficiency, neonatal neutropenia, short limbed dwarfism, and Nezelof syndrome-combined immunodeficiency with Igs.

[0608] In a preferred embodiment, the immunodeficiencies and/or conditions associated with the immunodeficiencies recited above are treated, prevented, diagnosed and/or prognosed using fusion proteins of the invention and/or polynucleotides encoding albumin fusion proteins of the invention.

[0609] In a preferred embodiment fusion proteins of the invention and/or polynucleotides encoding albumin fusion proteins of the invention could be used as an agent to boost immunoresponsiveness among immunodeficient individuals. In specific embodiments, fusion proteins of the invention and/or polynucleotides encoding albumin fusion proteins of the invention could be used as an agent to boost immunoresponsiveness among B cell and/or T cell immunodeficient individuals.

[0610] The albumin fusion proteins of the invention and/or polynucleotides encoding albumin fusion proteins of the invention may be useful in treating, preventing, diagnosing and/or prognosing autoimmune disorders. Many autoimmune disorders result from inappropriate recognition of self as foreign material by immune cells. This inappropriate recognition results in an immune response leading to the destruction of the host tissue. Therefore, the administration of fusion proteins of the invention and/or polynucleotides encoding albumin fusion proteins of the invention that can inhibit an immune response, particularly the proliferation, differentiation, or chemotaxis of T-cells, may be an effective therapy in preventing autoimmune disorders.

[0611] Autoimmune diseases or disorders that may be treated, prevented, diagnosed and/or prognosed by fusion proteins of the invention and/or polynucleotides encoding albumin fusion proteins of the invention include, but are not limited to, one or more of the following: systemic lupus erythematosus, rheumatoid arthritis, ankylosing spondylitis, multiple sclerosis, autoimmune thyroiditis, Hashimoto's thyroiditis, autoimmune hemolytic anemia, hemolytic anemia, thrombocytopenia, autoimmune thrombocytopenia purpura, autoimmune neonatal thrombocytopenia, idiopathic thrombocytopenia purpura, purpura (e.g., Henloch-Scoenlein purpura), autoimmunocytopenia, Goodpasture's syndrome, Pemphigus vulgaris, myasthenia gravis, Grave's disease (hyperthyroidism), and insulin-resistant diabetes mellitus.

[0612] Additional disorders that are likely to have an autoimmune component that may be treated, prevented, and/or diagnosed with the albumin fusion proteins of the invention and/or polynucleotides encoding albumin fusion proteins of the invention include, but are not limited to, type II collagen-induced arthritis, antiphospholipid syndrome, dermatitis, allergic encephalomyelitis, myocarditis, relapsing polychondritis, rheumatic heart disease, neuritis, uveitis ophthalmia, polyendocrinopathies, Reiter's Disease, Stiff-Man Syndrome, autoimmune pulmonary inflammation, autism, Guillain-Barre Syndrome, insulin dependent diabetes mellitus, and autoimmune inflammatory eye disorders.

[0613] Additional disorders that are likely to have an autoimmune component that may be treated, prevented, diagnosed and/or prognosed with the albumin fusion proteins of the invention and/or polynucleotides encoding albumin fusion proteins of the invention include, but are not limited to, scleroderma with anti-collagen antibodies (often characterized, e.g., by nucleolar and other nuclear antibodies), mixed connective tissue disease (often characterized, e.g., by antibodies to extractable nuclear antigens (e.g., ribonucleoprotein)), polymyositis (often characterized, e.g., by nonhistone ANA), pernicious anemia (often characterized, e.g., by antiparietal cell, microsomes, and intrinsic factor antibodies), idiopathic Addison's disease (often characterized, e.g., by humoral and cell-mediated adrenal cytotoxicity, infertility (often characterized, e.g., by antispermatozoal antibodies), glomerulonephritis (often characterized, e.g., by glomerular basement membrane antibodies or immune complexes), bullous pemphigoid (often characterized, e.g., by IgG and complement in basement membrane), Sjogren's syndrome (often characterized, e.g., by multiple tissue antibodies, and/or a specific nonhistone ANA (SS-B)), diabetes mellitus (often characterized, e.g., by cell-mediated and humoral islet cell antibodies), and adrenergic drug resistance (including adrenergic drug resistance with asthma or cystic fibrosis) (often characterized, e.g., by beta-adrenergic receptor antibodies).

[0614] Additional disorders that may have an autoimmune component that may be treated, prevented, diagnosed and/or prognosed with the albumin fusion proteins of the invention and/or polynucleotides encoding albumin fusion proteins of the invention include, but are not limited to, chronic active hepatitis (often characterized, e.g., by smooth muscle antibodies), primary biliary cirrhosis (often characterized, e.g., by mitochondria antibodies), other endocrine gland failure (often characterized, e.g., by specific tissue antibodies in some cases), vitiligo (often characterized, e.g., by melanocyte antibodies), vasculitis (often characterized, e.g., by Ig and complement in vessel walls and/or low serum complement), post-MI (often characterized, e.g., by myocardial antibodies), cardiotomy syndrome (often characterized, e.g., by myocardial antibodies), urticaria (often characterized, e.g., by IgG and IgM antibodies to IgE), atopic dermatitis (often characterized, e.g., by IgG and IgM antibodies to IgE), asthma (often characterized, e.g., by IgG and IgM antibodies to IgE), and many other inflammatory, granulomatous, degenerative, and atrophic disorders.

[0615] In a preferred embodiment, the autoimmune diseases and disorders and/or conditions associated with the diseases and disorders recited above are treated, prevented, diagnosed and/or prognosed using for example, fusion proteins of the invention and/or polynucleotides encoding albumin fusion proteins of the invention. In a specific preferred embodiment, rheumatoid arthritis is treated, prevented, and/or diagnosed using fusion proteins of the invention and/or polynucleotides encoding albumin fusion proteins of the invention.

[0616] In another specific preferred embodiment, systemic lupus erythematosus is treated, prevented, and/or diagnosed using fusion proteins of the invention and/or polynucleotides encoding albumin fusion proteins of the invention. In another specific preferred embodiment, idiopathic thrombocytopenia purpura is treated, prevented, and/or diagnosed using fusion proteins of the invention and/or polynucleotides encoding albumin fusion proteins of the invention.

[0617] In another specific preferred embodiment IgA nephropathy is treated, prevented, and/or diagnosed using fusion proteins of the invention and/or polynucleotides encoding albumin fusion proteins of the invention.

[0618] In a preferred embodiment, the autoimmune diseases and disorders and/or conditions associated with the diseases and disorders recited above are treated, prevented, diagnosed and/or prognosed using fusion proteins of the invention and/or polynucleotides encoding albumin fusion proteins of the invention.

[0619] In preferred embodiments, fusion proteins of the invention and/or polynucleotides encoding albumin fusion proteins of the invention are used as a immunosuppressive agent(s).

[0620] Albumin fusion proteins of the invention and/or polynucleotides encoding albumin fusion proteins of the invention may be useful in treating, preventing, prognosing, and/or diagnosing diseases, disorders, and/or conditions of hematopoietic cells. Albumin fusion proteins of the invention and/or polynucleotides encoding albumin fusion proteins of the invention could be used to increase differentiation and proliferation of hematopoietic cells, including the pluripotent stem cells, in an effort to treat or prevent those diseases, disorders, and/or conditions associated with a decrease in certain (or many) types hematopoietic cells, including but not limited to, leukopenia, neutropenia, anemia, and thrombocytopenia. Alternatively, fusion proteins of the invention and/or polynucleotides encoding albumin fusion proteins of the invention could be used to increase differentiation and proliferation of hematopoietic cells, including the pluripotent stem cells, in an effort to treat or prevent those diseases, disorders, and/or conditions associated with an increase in certain (or many) types of hematopoietic cells, including but not limited to, histiocytosis.

[0621] Allergic reactions and conditions, such as asthma (particularly allergic asthma) or other respiratory problems, may also be treated, prevented, diagnosed and/or prognosed using fusion proteins of the invention and/or polynucleotides encoding albumin fusion proteins of the invention. Moreover, these molecules can be used to treat, prevent, prognose, and/or diagnose anaphylaxis, hypersensitivity to an antigenic molecule, or blood group incompatibility.

[0622] Additionally, fusion proteins of the invention and/or polynucleotides encoding albumin fusion proteins of the invention, may be used to treat, prevent, diagnose and/or prognose IgE-mediated allergic reactions. Such allergic reactions include, but are not limited to, asthma, rhinitis, and eczema. In specific embodiments, fusion proteins of the invention and/or polynucleotides encoding albumin fusion proteins of the invention may be used to modulate IgE concentrations in vitro or in vivo.

[0623] Moreover, fusion proteins of the invention and/or polynucleotides encoding albumin fusion proteins of the invention have uses in the diagnosis, prognosis, prevention, and/or treatment of inflammatory conditions. For example, since fusion proteins of the invention and/or polynucleotides encoding albumin fusion proteins of the invention may inhibit the activation, proliferation and/or differentiation of cells involved in an inflammatory response, these molecules can be used to prevent and/or treat chronic and acute inflammatory conditions. Such inflammatory conditions include, but are not limited to, for example, inflammation associated with infection (e.g., septic shock, sepsis, or systemic inflammatory response syndrome), ischemia-reperfusion injury, endotoxin lethality, complement-mediated hyperacute rejection, nephritis, cytokine or chemokine induced lung injury, inflammatory bowel disease, Crohn's disease, over production of cytokines (e.g., TNF or IL-1.), respiratory disorders (e.g., asthma and allergy); gastrointestinal disorders (e.g., inflammatory bowel disease); cancers (e.g., gastric, ovarian, lung, bladder, liver, and breast); CNS disorders (e.g., multiple sclerosis; ischemic brain injury and/or stroke, traumatic brain injury, neurodegenerative disorders (e.g., Parkinson's disease and Alzheimer's disease); AIDS-related dementia; and prion disease); cardiovascular disorders (e.g., atherosclerosis, myocarditis, cardiovascular disease, and cardiopulmonary bypass complications); as well as many additional diseases, conditions, and disorders that are characterized by inflammation (e.g., hepatitis, rheumatoid arthritis, gout, trauma, pancreatitis, sarcoidosis, dermatitis, renal ischemia-reperfusion injury, Grave's disease, systemic lupus erythematosus, diabetes mellitus, and allogenic transplant rejection).

[0624] Because inflammation is a fundamental defense mechanism, inflammatory disorders can effect virtually any tissue of the body. Accordingly, fusion proteins of the invention and/or polynucleotides encoding albumin fusion proteins of the invention, have uses in the treatment of tissue-specific inflammatory disorders, including, but not limited to, adrenalitis, alveolitis, angiocholecystitis, appendicitis, balanitis, blepharitis, bronchitis, bursitis, carditis, cellulitis, cervicitis, cholecystitis, chorditis, cochlitis, colitis, conjunctivitis, cystitis, dermatitis, diverticulitis, encephalitis, endocarditis, esophagitis, eustachitis, fibrositis, folliculitis, gastritis, gastroenteritis, gingivitis, glossitis, hepatosplenitis, keratitis, labyrinthitis, laryngitis, lymphangitis, mastitis, media otitis, meningitis, metritis, mucitis, myocarditis, myosititis, myringitis, nephritis, neuritis, orchitis, osteochondritis, otitis, pericarditis, peritendonitis, peritonitis, pharyngitis, phlebitis, poliomyelitis, prostatitis, pulpitis, retinitis, rhinitis, salpingitis, scleritis, sclerochoroiditis, scrotitis, sinusitis, spondylitis, steatitis, stomatitis, synovitis, syringitis, tendonitis, tonsillitis, urethritis, and vaginitis.

[0625] In specific embodiments, fusion proteins of the invention and/or polynucleotides encoding albumin fusion proteins of the invention, are useful to diagnose, prognose, prevent, and/or treat organ transplant rejections and graft-versus-host disease. Organ rejection occurs by host immune cell destruction of the transplanted tissue through an immune response. Similarly, an immune response is also involved in GVHD, but, in this case, the foreign transplanted immune cells destroy the host tissues. Polypeptides, antibodies, or polynucleotides of the invention, and/or agonists or antagonists thereof, that inhibit an immune response, particularly the activation, proliferation, differentiation, or chemotaxis of T-cells, may be an effective therapy in preventing organ rejection or GVHD. In specific embodiments, fusion proteins of the invention and/or polynucleotides encoding albumin fusion proteins of the invention, that inhibit an immune response, particularly the activation, proliferation, differentiation, or chemotaxis of T-cells, may be an effective therapy in preventing experimental allergic and hyperacute xenograft rejection.

[0626] In other embodiments, fusion proteins of the invention and/or polynucleotides encoding albumin fusion proteins of the invention, are useful to diagnose, prognose, prevent, and/or treat immune complex diseases, including, but not limited to, serum sickness, post streptococcal glomerulonephritis, polyarteritis nodosa, and immune complex-induced vasculitis.

[0627] Albumin fusion proteins of the invention and/or polynucleotides encoding albumin fusion proteins of the invention can be used to treat, detect, and/or prevent infectious agents. For example, by increasing the immune response, particularly increasing the proliferation activation and/or differentiation of B and/or T cells, infectious diseases may be treated, detected, and/or prevented. The immune response may be increased by either enhancing an existing immune response, or by initiating a new immune response. Alternatively, fusion proteins of the invention and/or polynucleotides encoding albumin fusion proteins of the invention may also directly inhibit the infectious agent (refer to section of application listing infectious agents, etc), without necessarily eliciting an immune response.

[0628] In another embodiment, albumin fusion proteins of the invention and/or polynucleotides encoding albumin fusion proteins of the invention are used as a vaccine adjuvant that enhances immune responsiveness to an antigen. In a specific embodiment, albumin fusion proteins of the invention and/or polynucleotides encoding albumin fusion proteins of the invention are used as an adjuvant to enhance tumor-specific immune responses.

[0629] In another specific embodiment, albumin fusion proteins of the invention and/or polynucleotides encoding albumin fusion proteins of the invention are used as an adjuvant to enhance anti-viral immune responses. Anti-viral immune responses that may be enhanced using the compositions of the invention as an adjuvant, include virus and virus associated diseases or symptoms described herein or otherwise known in the art. In specific embodiments, the compositions of the invention are used as an adjuvant to enhance an immune response to a virus, disease, or symptom selected from the group consisting of: AIDS, meningitis, Dengue, EBV, and hepatitis (e.g., hepatitis B). In another specific embodiment, the compositions of the invention are used as an adjuvant to enhance an immune response to a virus, disease, or symptom selected from the group consisting of: HIV/AIDS, respiratory syncytial virus, Dengue, rotavirus, Japanese B encephalitis, influenza A and B, parainfluenza, measles, cytomegalovirus, rabies, Junin, Chikungunya, Rift Valley Fever, herpes simplex, and yellow fever.

[0630] In another specific embodiment, albumin fusion proteins of the invention and/or polynucleotides encoding albumin fusion proteins of the invention are used as an adjuvant to enhance anti-bacterial or anti-fungal immune responses. Anti-bacterial or anti-fungal immune responses that may be enhanced using the compositions of the invention as an adjuvant, include bacteria or fungus and bacteria or fungus associated diseases or symptoms described herein or otherwise known in the art. In specific embodiments, the compositions of the invention are used as an adjuvant to enhance an immune response to a bacteria or fungus, disease, or symptom selected from the group consisting of: tetanus, Diphtheria, botulism, and meningitis type B.

[0631] In another specific embodiment, the compositions of the invention are used as an adjuvant to enhance an immune response to a bacteria or fungus, disease, or symptom selected from the group consisting of: Vibrio cholerae, Mycobacterium leprae, Salmonella typhi, Salmonella paratyphi, Meisseria meningitidis, Streptococcus pneumoniae, Group B streptococcus, Shigella spp., Enterotoxigenic Escherichia coli, Enterohemorrhagic E. coli, and Borrelia burgdorferi.

[0632] In another specific embodiment, albumin fusion proteins of the invention and/or polynucleotides encoding albumin fusion proteins of the invention are used as an adjuvant to enhance anti-parasitic immune responses. Anti-parasitic immune responses that may be enhanced using the compositions of the invention as an adjuvant, include parasite and parasite associated diseases or symptoms described herein or otherwise known in the art. In specific embodiments, the compositions of the invention are used as an adjuvant to enhance an immune response to a parasite. In another specific embodiment, the compositions of the invention are used as an adjuvant to enhance an immune response to Plasmodium (malaria) or Leishmania.

[0633] In another specific embodiment, albumin fusion proteins of the invention and/or polynucleotides encoding albumin fusion proteins of the invention may also be employed to treat infectious diseases including silicosis, sarcoidosis, and idiopathic pulmonary fibrosis; for example, by preventing the recruitment and activation of mononuclear phagocytes.

[0634] In another specific embodiment, albumin fusion proteins of the invention and/or polynucleotides encoding albumin fusion proteins of the invention are used as an antigen for the generation of antibodies to inhibit or enhance immune mediated responses against polypeptides of the invention.

[0635] In one embodiment, albumin fusion proteins of the invention and/or polynucleotides encoding albumin fusion proteins of the invention are administered to an animal (e.g., mouse, rat, rabbit, hamster, guinea pig, pigs, micro-pig, chicken, camel, goat, horse, cow, sheep, dog, cat, non-human primate, and human, most preferably human) to boost the immune system to produce increased quantities of one or more antibodies (e.g., IgG, IgA, IgM, and IgE), to induce higher affinity antibody production and immunoglobulin class switching (e.g., IgG, IgA, IgM, and IgE), and/or to increase an immune response.

[0636] In another specific embodiment, albumin fusion proteins of the invention and/or polynucleotides encoding albumin fusion proteins of the invention are used as a stimulator of B cell responsiveness to pathogens.

[0637] In another specific embodiment, albumin fusion proteins of the invention and/or polynucleotides encoding albumin fusion proteins of the invention are used as an activator of T cells.

[0638] In another specific embodiment, albumin fusion proteins of the invention and/or polynucleotides encoding albumin fusion proteins of the invention are used as an agent that elevates the immune status of an individual prior to their receipt of immunosuppressive therapies.

[0639] In another specific embodiment, albumin fusion proteins of the invention and/or polynucleotides encoding albumin fusion proteins of the invention are used as an agent to induce higher affinity antibodies.

[0640] In another specific embodiment, albumin fusion proteins of the invention and/or polynucleotides encoding albumin fusion proteins of the invention are used as an agent to increase serum immunoglobulin concentrations.

[0641] In another specific embodiment, albumin fusion proteins of the invention and/or polynucleotides encoding albumin fusion proteins of the invention are used as an agent to accelerate recovery of immunocompromised individuals.

[0642] In another specific embodiment, albumin fusion proteins of the invention and/or polynucleotides encoding albumin fusion proteins of the invention are used as an agent to boost immunoresponsiveness among aged populations and/or neonates.

[0643] In another specific embodiment, albumin fusion proteins of the invention and/or polynucleotides encoding albumin fusion proteins of the invention are used as an immune system enhancer prior to, during, or after bone marrow transplant and/or other transplants (e.g., allogeneic or xenogeneic organ transplantation). With respect to transplantation, compositions of the invention may be administered prior to, concomitant with, and/or after transplantation. In a specific embodiment, compositions of the invention are administered after transplantation, prior to the beginning of recovery of T-cell populations. In another specific embodiment, compositions of the invention are first administered after transplantation after the beginning of recovery of T cell populations, but prior to full recovery of B cell populations.

[0644] In another specific embodiment, albumin fusion proteins of the invention and/or polynucleotides encoding albumin fusion proteins of the invention are used as an agent to boost immunoresponsiveness among individuals having an acquired loss of B cell function. Conditions resulting in an acquired loss of B cell function that may be ameliorated or treated by administering the albumin fusion proteins of the invention and/or polynucleotides encoding albumin fusion proteins of the invention, include, but are not limited to, HIV Infection, AIDS, bone marrow transplant, and B cell chronic lymphocytic leukemia (CLL).

[0645] In another specific embodiment, albumin fusion proteins of the invention and/or polynucleotides encoding albumin fusion proteins of the invention are used as an agent to boost immunoresponsiveness among individuals having a temporary immune deficiency. Conditions resulting in a temporary immune deficiency that may be ameliorated or treated by administering the albumin fusion proteins of the invention and/or polynucleotides encoding albumin fusion proteins of the invention, include, but are not limited to, recovery from viral infections (e.g., influenza), conditions associated with malnutrition, recovery from infectious mononucleosis, or conditions associated with stress, recovery from measles, recovery from blood transfusion, and recovery from surgery.

[0646] In another specific embodiment, albumin fusion proteins of the invention and/or polynucleotides encoding albumin fusion proteins of the invention are used as a regulator of antigen presentation by monocytes, dendritic cells, and/or B-cells. In one embodiment, albumin fusion proteins of the invention and/or polynucleotides encoding albumin fusion proteins of the invention enhance antigen presentation or antagonizes antigen presentation in vitro or in vivo. Moreover, in related embodiments, this enhancement or antagonism of antigen presentation may be useful as an anti-tumor treatment or to modulate the immune system.

[0647] In another specific embodiment, albumin fusion proteins of the invention and/or polynucleotides encoding albumin fusion proteins of the invention are used as an agent to direct an individual's immune system towards development of a humoral response (i.e. TH2) as opposed to a TH1 cellular response.

[0648] In another specific embodiment, albumin fusion proteins of the invention and/or polynucleotides encoding albumin fusion proteins of the invention are used as a means to induce tumor proliferation and thus make it more susceptible to anti-neoplastic agents. For example, multiple myeloma is a slowly dividing disease and is thus refractory to virtually all anti-neoplastic regimens. If these cells were forced to proliferate more rapidly their susceptibility profile would likely change.

[0649] In another specific embodiment, albumin fusion proteins of the invention and/or polynucleotides encoding albumin fusion proteins of the invention are used as a stimulator of B cell production in pathologies such as AIDS, chronic lymphocyte disorder and/or Common Variable Immunodificiency.

[0650] In another specific embodiment, albumin fusion proteins of the invention and/or polynucleotides encoding albumin fusion proteins of the invention are used as a therapy for generation and/or regeneration of lymphoid tissues following surgery, trauma or genetic defect. In another specific embodiment, albumin fusion proteins of the invention and/or polynucleotides encoding albumin fusion proteins of the invention are used in the pretreatment of bone marrow samples prior to transplant.

[0651] In another specific embodiment, albumin fusion proteins of the invention and/or polynucleotides encoding albumin fusion proteins of the invention are used as a gene-based therapy for genetically inherited disorders resulting in immuno-incompetence/immunodeficiency such as observed among SCID patients.

[0652] In another specific embodiment, albumin fusion proteins of the invention and/or polynucleotides encoding albumin fusion proteins of the invention are used as a means of activating monocytes/macrophages to defend against parasitic diseases that effect monocytes such as Leishmania.

[0653] In another specific embodiment, albumin fusion proteins of the invention and/or polynucleotides encoding albumin fusion proteins of the invention are used as a means of regulating secreted cytokines that are elicited by polypeptides of the invention.

[0654] In another embodiment, albumin fusion proteins of the invention and/or polynucleotides encoding albumin fusion proteins of the invention are used in one or more of the applications decribed herein, as they may apply to veterinary medicine.

[0655] In another specific embodiment, albumin fusion proteins of the invention and/or polynucleotides encoding albumin fusion proteins of the invention are used as a means of blocking various aspects of immune responses to foreign agents or self. Examples of diseases or conditions in which blocking of certain aspects of immune responses may be desired include autoimmune disorders such as lupus, and arthritis, as well as immunoresponsiveness to skin allergies, inflammation, bowel disease, injury and diseases/disorders associated with pathogens.

[0656] In another specific embodiment, albumin fusion proteins of the invention and/or polynucleotides encoding albumin fusion proteins of the invention are used as a therapy for preventing the B cell proliferation and Ig secretion associated with autoimmune diseases such as idiopathic thrombocytopenic purpura, systemic lupus erythematosus and multiple sclerosis.

[0657] In another specific embodiment, polypeptides, antibodies, polynucleotides and/or agonists or antagonists of the present fusion proteins of the invention and/or polynucleotides encoding albumin fusion proteins of the invention invention are used as a inhibitor of B and/or T cell migration in endothelial cells. This activity disrupts tissue architecture or cognate responses and is useful, for example in disrupting immune responses, and blocking sepsis.

[0658] In another specific embodiment, albumin fusion proteins of the invention and/or polynucleotides encoding albumin fusion proteins of the invention are used as a therapy for chronic hypergammaglobulinemia evident in such diseases as monoclonal gammopathy of undetermined significance (MGUS), Waldenstrom's disease, related idiopathic monoclonal gammopathies, and plasmacytomas.

[0659] In another specific embodiment, albumin fusion proteins of the invention and/or polynucleotides encoding albumin fusion proteins of the invention may be employed for instance to inhibit polypeptide chemotaxis and activation of macrophages and their precursors, and of neutrophils, basophils, B lymphocytes and some T-cell subsets, e.g., activated and CD8 cytotoxic T cells and natural killer cells, in certain autoimmune and chronic inflammatory and infective diseases. Examples of autoimmune diseases are described herein and include multiple sclerosis, and insulin-dependent diabetes.

[0660] The albumin fusion proteins of the invention and/or polynucleotides encoding albumin fusion proteins of the invention may also be employed to treat idiopathic hyper-eosinophilic syndrome by, for example, preventing eosinophil production and migration.

[0661] In another specific embodiment, albumin fusion proteins of the invention and/or polynucleotides encoding albumin fusion proteins of the invention are used to enhance or inhibit complement mediated cell lysis.

[0662] In another specific embodiment, albumin fusion proteins of the invention and/or polynucleotides encoding albumin fusion proteins of the invention are used to enhance or inhibit antibody dependent cellular cytotoxicity.

[0663] In another specific embodiment, albumin fusion proteins of the invention and/or polynucleotides encoding albumin fusion proteins of the invention may also be employed for treating atherosclerosis, for example, by preventing monocyte infiltration in the artery wall.

[0664] In another specific embodiment, albumin fusion proteins of the invention and/or polynucleotides encoding albumin fusion proteins of the invention may be employed to treat adult respiratory distress syndrome (ARDS).

[0665] In another specific embodiment, albumin fusion proteins of the invention and/or polynucleotides encoding albumin fusion proteins of the invention may be useful for stimulating wound and tissue repair, stimulating angiogenesis, and/or stimulating the repair of vascular or lymphatic diseases or disorders. Additionally, fusion proteins of the invention and/or polynucleotides encoding albumin fusion proteins of the invention may be used to stimulate the regeneration of mucosal surfaces.

[0666] In a specific embodiment, albumin fusion proteins of the invention and/or polynucleotides encoding albumin fusion proteins of the invention are used to diagnose, prognose, treat, and/or prevent a disorder characterized by primary or acquired immunodeficiency, deficient serum immunoglobulin production, recurrent infections, and/or immune system dysfunction. Moreover, fusion proteins of the invention and/or polynucleotides encoding albumin fusion proteins of the invention may be used to treat or prevent infections of the joints, bones, skin, and/or parotid glands, blood-borne infections (e.g., sepsis, meningitis, septic arthritis, and/or osteomyelitis), autoimmune diseases (e.g., those disclosed herein), inflammatory disorders, and malignancies, and/or any disease or disorder or condition associated with these infections, diseases, disorders and/or malignancies) including, but not limited to, CVID, other primary immune deficiencies, HIV disease, CLL, recurrent bronchitis, sinusitis, otitis media, conjunctivitis, pneumonia, hepatitis, meningitis, herpes zoster (e.g., severe herpes zoster), and/or pneumocystis carnii. Other diseases and disorders that may be prevented, diagnosed, prognosed, and/or treated with fusion proteins of the invention and/or polynucleotides encoding albumin fusion proteins of the invention include, but are not limited to, HIV infection, HTLV-BLV infection, lymphopenia, phagocyte bactericidal dysfunction anemia, thrombocytopenia, and hemoglobinuria.

[0667] In another embodiment, albumin fusion proteins of the invention and/or polynucleotides encoding albumin fusion proteins of the invention are used to treat, and/or diagnose an individual having common variable immunodeficiency disease (“CVID”; also known as “acquired agammaglobulinemia” and “acquired hypogammaglobulinemia”) or a subset of this disease.

[0668] In a specific embodiment, albumin fusion proteins of the invention and/or polynucleotides encoding albumin fusion proteins of the invention may be used to diagnose, prognose, prevent, and/or treat cancers or neoplasms including immune cell or immune tissue-related cancers or neoplasms. Examples of cancers or neoplasms that may be prevented, diagnosed, or treated by fusion proteins of the invention and/or polynucleotides encoding albumin fusion proteins of the invention include, but are not limited to, acute myelogenous leukemia, chronic myelogenous leukemia, Hodgkin's disease, non-Hodgkin's lymphoma, acute lymphocytic anemia (ALL) Chronic lymphocyte leukemia, plasmacytomas, multiple myeloma, Burkitt's lymphoma, EBV-transformed diseases, and/or diseases and disorders described in the section entitled “Hyperproliferative Disorders” elsewhere herein.

[0669] In another specific embodiment, albumin fusion proteins of the invention and/or polynucleotides encoding albumin fusion proteins of the invention are used as a therapy for decreasing cellular proliferation of Large B-cell Lymphomas.

[0670] In another specific embodiment, albumin fusion proteins of the invention and/or polynucleotides encoding albumin fusion proteins of the invention are used as a means of decreasing the involvement of B cells and Ig associated with Chronic Myelogenous Leukemia.

[0671] In specific embodiments, the compositions of the invention are used as an agent to boost immunoresponsiveness among B cell immunodeficient individuals, such as, for example, an individual who has undergone a partial or complete splenectomy.

[0672] Blood-Related Disorders

[0673] The albumin fusion proteins of the invention and/or polynucleotides encoding albumin fusion proteins of the invention may be used to modulate hemostatic (the stopping of bleeding) or thrombolytic (clot dissolving) activity. For example, by increasing hemostatic or thrombolytic activity, fusion proteins of the invention and/or polynucleotides encoding albumin fusion proteins of the invention could be used to treat or prevent blood coagulation diseases, disorders, and/or conditions (e.g., afibrinogenemia, factor deficiencies, hemophilia), blood platelet diseases, disorders, and/or conditions (e.g., thrombocytopenia), or wounds resulting from trauma, surgery, or other causes. Alternatively, fusion proteins of the invention and/or polynucleotides encoding albumin fusion proteins of the invention that can decrease hemostatic or thrombolytic activity could be used to inhibit or dissolve clotting. These molecules could be important in the treatment or prevention of heart attacks (infarction), strokes, or scarring.

[0674] In specific embodiments, the albumin fusion proteins of the invention and/or polynucleotides encoding albumin fusion proteins of the invention may be used to prevent, diagnose, prognose, and/or treat thrombosis, arterial thrombosis, venous thrombosis, thromboembolism, pulmonary embolism, atherosclerosis, myocardial infarction, transient ischemic attack, unstable angina. In specific embodiments, the albumin fusion proteins of the invention and/or polynucleotides encoding albumin fusion proteins of the invention may be used for the prevention of occulsion of saphenous grafts, for reducing the risk of periprocedural thrombosis as might accompany angioplasty procedures, for reducing the risk of stroke in patients with atrial fibrillation including nonrheumatic atrial fibrillation, for reducing the risk of embolism associated with mechanical heart valves and or mitral valves disease. Other uses for the albumin fusion proteins of the invention and/or polynucleotides encoding albumin fusion proteins of the invention, include, but are not limited to, the prevention of occlusions in extrcorporeal devices (e.g., intravascular canulas, vascular access shunts in hemodialysis patients, hemodialysis machines, and cardiopulmonary bypass machines).

[0675] In another embodiment, albumin fusion proteins of the invention and/or polynucleotides encoding albumin fusion proteins of the invention, may be used to prevent, diagnose, prognose, and/or treat diseases and disorders of the blood and/or blood forming organs associated with the tissue(s) in which the polypeptide of the invention is expressed.

[0676] The fusion proteins of the invention and/or polynucleotides encoding albumin fusion proteins of the invention may be used to modulate hematopoietic activity (the formation of blood cells). For example, the albumin fusion proteins of the invention and/or polynucleotides encoding albumin fusion proteins of the invention may be used to increase the quantity of all or subsets of blood cells, such as, for example, erythrocytes, lymphocytes (B or T cells), myeloid cells (e.g., basophils, eosinophils, neutrophils, mast cells, macrophages) and platelets. The ability to decrease the quantity of blood cells or subsets of blood cells may be useful in the prevention, detection, diagnosis and/or treatment of anemias and leukopenias described below. Alternatively, the albumin fusion proteins of the invention and/or polynucleotides encoding albumin fusion proteins of the invention may be used to decrease the quantity of all or subsets of blood cells, such as, for example, erythrocytes, lymphocytes (B or T cells), myeloid cells (e.g., basophils, eosinophils, neutrophils, mast cells, macrophages) and platelets. The ability to decrease the quantity of blood cells or subsets of blood cells may be useful in the prevention, detection, diagnosis and/or treatment of leukocytoses, such as, for example eosinophilia.

[0677] The fusion proteins of the invention and/or polynucleotides encoding albumin fusion proteins of the invention may be used to prevent, treat, or diagnose blood dyscrasia.

[0678] Anemias are conditions in which the number of red blood cells or amount of hemoglobin (the protein that carries oxygen) in them is below normal. Anemia may be caused by excessive bleeding, decreased red blood cell production, or increased red blood cell destruction (hemolysis). The albumin fusion proteins of the invention and/or polynucleotides encoding albumin fusion proteins of the invention may be useful in treating, preventing, and/or diagnosing anemias. Anemias that may be treated prevented or diagnosed by the albumin fusion proteins of the invention and/or polynucleotides encoding albumin fusion proteins of the invention include iron deficiency anemia, hypochromic anemia, microcytic anemia, chlorosis, hereditary siderob;astic anemia, idiopathic acquired sideroblastic anemia, red cell aplasia, megaloblastic anemia (e.g., pernicious anemia, (vitamin B12 deficiency) and folic acid deficiency anemia), aplastic anemia, hemolytic anemias (e.g., autoimmune helolytic anemia, microangiopathic hemolytic anemia, and paroxysmal nocturnal hemoglobinuria). The albumin fusion proteins of the invention and/or polynucleotides encoding albumin fusion proteins of the invention may be useful in treating, preventing, and/or diagnosing anemias associated with diseases including but not limited to, anemias associated with systemic lupus erythematosus, cancers, lymphomas, chronic renal disease, and enlarged spleens. The albumin fusion proteins of the invention and/or polynucleotides encoding albumin fusion proteins of the invention may be useful in treating, preventing, and/or diagnosing anemias arising from drug treatments such as anemias associated with methyldopa, dapsone, and/or sulfadrugs. Additionally, fusion proteins of the invention and/or polynucleotides encoding albumin fusion proteins of the invention may be useful in treating, preventing, and/or diagnosing anemias associated with abnormal red blood cell architecture including but not limited to, hereditary spherocytosis, hereditary elliptocytosis, glucose-6-phosphate dehydrogenase deficiency, and sickle cell anemia.

[0679] The albumin fusion proteins of the invention and/or polynucleotides encoding albumin fusion proteins of the invention may be useful in treating, preventing, and/or diagnosing hemoglobin abnormalities, (e.g., those associated with sickle cell anemia, hemoglobin C disease, hemoglobin S-C disease, and hemoglobin E disease). Additionally, the albumin fusion proteins of the invention and/or polynucleotides encoding albumin fusion proteins of the invention may be useful in diagnosing, prognosing, preventing, and/or treating thalassemias, including, but not limited to, major and minor forms of alpha-thalassemia and beta-thalassemia.

[0680] In another embodiment, the albumin fusion proteins of the invention and/or polynucleotides encoding albumin fusion proteins of the invention may be useful in diagnosing, prognosing, preventing, and/or treating bleeding disorders including, but not limited to, thrombocytopenia (e.g., idiopathic thrombocytopenic purpura, and thrombotic thrombocytopenic purpura), Von Willebrand's disease, hereditary platelet disorders (e.g., storage pool disease such as Chediak-Higashi and Hermansky-Pudlak syndromes, thromboxane A2 dysfunction, thromboasthenia, and Bernard-Soulier syndrome), hemolytic-uremic syndrome, hemophelias such as hemophelia A or Factor VII deficiency and Christmas disease or Factor IX deficiency, Hereditary Hemorhhagic Telangiectsia, also known as Rendu-Osler-Weber syndrome, allergic purpura (Henoch Schonlein purpura) and disseminated intravascular coagulation.

[0681] The effect of the albumin fusion proteins of the invention and/or polynucleotides encoding albumin fusion proteins of the invention on the clotting time of blood may be monitored using any of the clotting tests known in the art including, but not limited to, whole blood partial thromboplastin time (PTT), the activated partial thromboplastin time (aPTT), the activated clotting time (ACT), the recalcified activated clotting time, or the Lee-White Clotting time.

[0682] Several diseases and a variety of drugs can cause platelet dysfunction. Thus, in a specific embodiment, the albumin fusion proteins of the invention and/or polynucleotides encoding albumin fusion proteins of the invention may be useful in diagnosing, prognosing, preventing, and/or treating acquired platelet dysfunction such as platelet dysfunction accompanying kidney failure, leukemia, multiple myeloma, cirrhosis of the liver, and systemic lupus erythematosus as well as platelet dysfunction associated with drug treatments, including treatment with aspirin, ticlopidine, nonsteroidal anti-inflammatory drugs (used for arthritis, pain, and sprains), and penicillin in high doses.

[0683] In another embodiment, the albumin fusion proteins of the invention and/or polynucleotides encoding albumin fusion proteins of the invention may be useful in diagnosing, prognosing, preventing, and/or treating diseases and disorders characterized by or associated with increased or decreased numbers of white blood cells. Leukopenia occurs when the number of white blood cells decreases below normal. Leukopenias include, but are not limited to, neutropenia and lymphocytopenia. An increase in the number of white blood cells compared to normal is known as leukocytosis. The body generates increased numbers of white blood cells during infection. Thus, leukocytosis may simply be a normal physiological parameter that reflects infection. Alternatively, leukocytosis may be an indicator of injury or other disease such as cancer. Leokocytoses, include but are not limited to, eosinophilia, and accumulations of macrophages. In specific embodiments, the albumin fusion proteins of the invention and/or polynucleotides encoding albumin fusion proteins of the invention may be useful in diagnosing, prognosing, preventing, and/or treating leukopenia. In other specific embodiments, the albumin fusion proteins of the invention and/or polynucleotides encoding albumin fusion proteins of the invention may be useful in diagnosing, prognosing, preventing, and/or treating leukocytosis.

[0684] Leukopenia may be a generalized decreased in all types of white blood cells, or may be a specific depletion of particular types of white blood cells. Thus, in specific embodiments, the albumin fusion proteins of the invention and/or polynucleotides encoding albumin fusion proteins of the invention may be useful in diagnosing, prognosing, preventing, and/or treating decreases in neutrophil numbers, known as neutropenia. Neutropenias that may be diagnosed, prognosed, prevented, and/or treated by the albumin fusion proteins of the invention and/or polynucleotides encoding albumin fusion proteins of the invention include, but are not limited to, infantile genetic agranulocytosis, familial neutropenia, cyclic neutropenia, neutropenias resulting from or associated with dietary deficiencies (e.g., vitamin B 12 deficiency or folic acid deficiency), neutropenias resulting from or associated with drug treatments (e.g., antibiotic regimens such as penicillin treatment, sulfonamide treatment, anticoagulant treatment, anticonvulsant drugs, anti-thyroid drugs, and cancer chemotherapy), and neutropenias resulting from increased neutrophil destruction that may occur in association with some bacterial or viral infections, allergic disorders, autoimmune diseases, conditions in which an individual has an enlarged spleen (e.g., Felty syndrome, malaria and sarcoidosis), and some drug treatment regimens.

[0685] The albumin fusion proteins of the invention and/or polynucleotides encoding albumin fusion proteins of the invention may be useful in diagnosing, prognosing, preventing, and/or treating lymphocytopenias (decreased numbers of B and/or T lymphocytes), including, but not limited to, lymphocytopenias resulting from or associated with stress, drug treatments (e.g., drug treatment with corticosteroids, cancer chemotherapies, and/or radiation therapies), AIDS infection and/or other diseases such as, for example, cancer, rheumatoid arthritis, systemic lupus erythematosus, chronic infections, some viral infections and/or hereditary disorders (e.g., DiGeorge syndrome, Wiskott-Aldrich Syndome, severe combined immunodeficiency, ataxia telangiectsia).

[0686] The albumin fusion proteins of the invention and/or polynucleotides encoding albumin fusion proteins of the invention may be useful in diagnosing, prognosing, preventing, and/or treating diseases and disorders associated with macrophage numbers and/or macrophage function including, but not limited to, Gaucher's disease, Niemann-Pick disease, Letterer-Siwe disease and Hand-Schuller-Christian disease.

[0687] In another embodiment, the albumin fusion proteins of the invention and/or polynucleotides encoding albumin fusion proteins of the invention may be useful in diagnosing, prognosing, preventing, and/or treating diseases and disorders associated with eosinophil numbers and/or eosinophil function including, but not limited to, idiopathic hypereosinophilic syndrome, eosinophilia-myalgia syndrome, and Hand-Schuller-Christian disease.

[0688] In yet another embodiment, the albumin fusion proteins of the invention and/or polynucleotides encoding albumin fusion proteins of the invention may be useful in diagnosing, prognosing, preventing, and/or treating leukemias and lymphomas including, but not limited to, acute lymphocytic (lymphpblastic) leukemia (ALL), acute myeloid (myelocytic, myelogenous, myeloblastic, or myelomonocytic) leukemia, chronic lymphocytic leukemia (e.g., B cell leukemias, T cell leukemias, Sezary syndrome, and Hairy cell leukenia), chronic myelocytic (myeloid, myelogenous, or granulocytic) leukemia, Hodgkin's lymphoma, non-hodgkin's lymphoma, Burkitt's lymphoma, and mycosis fungoides.

[0689] In other embodiments, the albumin fusion proteins of the invention and/or polynucleotides encoding albumin fusion proteins of the invention may be useful in diagnosing, prognosing, preventing, and/or treating diseases and disorders of plasma cells including, but not limited to, plasma cell dyscrasias, monoclonal gammaopathies, monoclonal gammopathies of undetermined significance, multiple myeloma, macroglobulinemia, Waldenstrom's macroglobulinemia, cryoglobulinemia, and Raynaud's phenomenon.

[0690] In other embodiments, the albumin fusion proteins of the invention and/or polynucleotides encoding albumin fusion proteins of the invention may be useful in treating, preventing, and/or diagnosing myeloproliferative disorders, including but not limited to, polycythemia vera, relative polycythemia, secondary polycythemia, myelofibrosis, acute myelofibrosis, agnogenic myelod metaplasia, thrombocythemia, (including both primary and seconday thrombocythemia) and chronic myelocytic leukemia.

[0691] In other embodiments, the albumin fusion proteins of the invention and/or polynucleotides encoding albumin fusion proteins of the invention may be useful as a treatment prior to surgery, to increase blood cell production.

[0692] In other embodiments, the albumin fusion proteins of the invention and/or polynucleotides encoding albumin fusion proteins of the invention may be useful as an agent to enhance the migration, phagocytosis, superoxide production, antibody dependent cellular cytotoxicity of neutrophils, eosionophils and macrophages.

[0693] In other embodiments, the albumin fusion proteins of the invention and/or polynucleotides encoding albumin fusion proteins of the invention may be useful as an agent to increase the number of stem cells in circulation prior to stem cells pheresis. In another specific embodiment, the albumin fusion proteins of the invention and/or polynucleotides encoding albumin fusion proteins of the invention may be useful as an agent to increase the number of stem cells in circulation prior to platelet pheresis.

[0694] In other embodiments, the albumin fusion proteins of the invention and/or polynucleotides encoding albumin fusion proteins of the invention may be useful as an agent to increase cytokine production.

[0695] In other embodiments, the albumin fusion proteins of the invention and/or polynucleotides encoding albumin fusion proteins of the invention may be useful in preventing, diagnosing, and/or treating primary hematopoietic disorders.

[0696] Hyperproliferative Disorders

[0697] In certain embodiments, fusion proteins of the invention and/or polynucleotides encoding albumin fusion proteins of the invention can be used to treat or detect hyperproliferative disorders, including neoplasms. Albumin fusion proteins of the invention and/or polynucleotides encoding albumin fusion proteins of the invention may inhibit the proliferation of the disorder through direct or indirect interactions. Alternatively, fusion proteins of the invention and/or polynucleotides encoding albumin fusion proteins of the invention may proliferate other cells which can inhibit the hyperproliferative disorder.

[0698] For example, by increasing an immune response, particularly increasing antigenic qualities of the hyperproliferative disorder or by proliferating, differentiating, or mobilizing T-cells, hyperproliferative disorders can be treated. This immune response may be increased by either enhancing an existing immune response, or by initiating a new immune response. Alternatively, decreasing an immune response may also be a method of treating hyperproliferative disorders, such as a chemotherapeutic agent.

[0699] Examples of hyperproliferative disorders that can be treated or detected by fusion proteins of the invention and/or polynucleotides encoding albumin fusion proteins of the invention include, but are not limited to neoplasms located in the: colon, abdomen, bone, breast, digestive system, liver, pancreas, peritoneum, endocrine glands (adrenal, parathyroid, pituitary, testicles, ovary, thymus, thyroid), eye, head and neck, nervous (central and peripheral), lymphatic system, pelvis, skin, soft tissue, spleen, thorax, and urogenital tract.

[0700] Similarly, other hyperproliferative disorders can also be treated or detected by fusion proteins of the invention and/or polynucleotides encoding albumin fusion proteins of the invention. Examples of such hyperproliferative disorders include, but are not limited to: Acute Childhood Lymphoblastic Leukemia, Acute Lymphoblastic Leukemia, Acute Lymphocytic Leukemia, Acute Myeloid Leukemia, Adrenocortical Carcinoma, Adult (Primary) Hepatocellular Cancer, Adult (Primary) Liver Cancer, Adult Acute Lymphocytic Leukemia, Adult Acute Myeloid Leukemia, Adult Hodgkin's Disease, Adult Hodgkin's Lymphoma, Adult Lymphocytic Leukemia, Adult Non-Hodgkin's Lymphoma, Adult Primary Liver Cancer, Adult Soft Tissue Sarcoma, AIDS-Related Lymphoma, AIDS-Related Malignancies, Anal Cancer, Astrocytoma, Bile Duct Cancer, Bladder Cancer, Bone Cancer, Brain Stem Glioma, Brain Tumors, Breast Cancer, Cancer of the Renal Pelvis and Ureter, Central Nervous System (Primary) Lymphoma, Central Nervous System Lymphoma, Cerebellar Astrocytoma, Cerebral Astrocytoma, Cervical Cancer, Childhood (Primary) Hepatocellular Cancer, Childhood (Primary) Liver Cancer, Childhood Acute Lymphoblastic Leukemia, Childhood Acute Myeloid Leukemia, Childhood Brain Stem Glioma, Childhood Cerebellar Astrocytoma, Childhood Cerebral Astrocytoma, Childhood Extracranial Germ Cell Tumors, Childhood Hodgkin's Disease, Childhood Hodgkin's Lymphoma, Childhood Hypothalamic and Visual Pathway Glioma, Childhood Lymphoblastic Leukemia, Childhood Medulloblastoma, Childhood Non-Hodgkin's Lymphoma, Childhood Pineal and Supratentorial Primitive Neuroectodermal Tumors, Childhood Primary Liver Cancer, Childhood Rhabdomyosarcoma, Childhood Soft Tissue Sarcoma, Childhood Visual Pathway and Hypothalamic Glioma, Chronic Lymphocytic Leukemia, Chronic Myelogenous Leukemia, Colon Cancer, Cutaneous T-Cell Lymphoma, Endocrine Pancreas Islet Cell Carcinoma, Endometrial Cancer, Ependymoma, Epithelial Cancer, Esophageal Cancer, Ewing's Sarcoma and Related Tumors, Exocrine Pancreatic Cancer, Extracranial Germ Cell Tumor, Extragonadal Germ Cell Tumor, Extrahepatic Bile Duct Cancer, Eye Cancer, Female Breast Cancer, Gaucher's Disease, Gallbladder Cancer, Gastric Cancer, Gastrointestinal Carcinoid Tumor, Gastrointestinal Tumors, Germ Cell Tumors, Gestational Trophoblastic Tumor, Hairy Cell Leukemia, Head and Neck Cancer, Hepatocellular Cancer, Hodgkin's Disease, Hodgkin's Lymphoma, Hypergammaglobulinemia, Hypopharyngeal Cancer, Intestinal Cancers, Intraocular Melanoma, Islet Cell Carcinoma, Islet Cell Pancreatic Cancer, Kaposi's Sarcoma, Kidney Cancer, Laryngeal Cancer, Lip and Oral Cavity Cancer, Liver Cancer, Lung Cancer, Lymphoproliferative Disorders, Macroglobulinemia, Male Breast Cancer, Malignant Mesothelioma, Malignant Thymoma, Medulloblastoma, Melanoma, Mesothelioma, Metastatic Occult Primary Squamous Neck Cancer, Metastatic Primary Squamous Neck Cancer, Metastatic Squamous Neck Cancer, Multiple Myeloma, Multiple Myeloma/Plasma Cell Neoplasm, Myelodysplastic Syndrome, Myelogenous Leukemia, Myeloid Leukemia, Myeloproliferative Disorders, Nasal Cavity and Paranasal Sinus Cancer, Nasopharyngeal Cancer, Neuroblastoma, Non-Hodgkin's Lymphoma During Pregnancy, Nonmelanoma Skin Cancer, Non-Small Cell Lung Cancer, Occult Primary Metastatic Squamous Neck Cancer, Oropharyngeal Cancer, Osteo-/Malignant Fibrous Sarcoma, Osteosarcoma/Malignant Fibrous Histiocytoma, Osteosarcoma/Malignant Fibrous Histiocytoma of Bone, Ovarian Epithelial Cancer, Ovarian Germ Cell Tumor, Ovarian Low Malignant Potential Tumor, Pancreatic Cancer, Paraproteinemias, Purpura, Parathyroid Cancer, Penile Cancer, Pheochromocytoma, Pituitary Tumor, Plasma Cell Neoplasm/Multiple Myeloma, Primary Central Nervous System Lymphoma, Primary Liver Cancer, Prostate Cancer, Rectal Cancer, Renal Cell Cancer, Renal Pelvis and Ureter Cancer, Retinoblastoma, Rhabdomyosarcoma, Salivary Gland Cancer, Sarcoidosis Sarcomas, Sezary Syndrome, Skin Cancer, Small Cell Lung Cancer, Small Intestine Cancer, Soft Tissue Sarcoma, Squamous Neck Cancer, Stomach Cancer, Supratentorial Primitive Neuroectodermal and Pineal Tumors, T-Cell Lymphoma, Testicular Cancer, Thymoma, Thyroid Cancer, Transitional Cell Cancer of the Renal Pelvis and Ureter, Transitional Renal Pelvis and Ureter Cancer, Trophoblastic Tumors, Ureter and Renal Pelvis Cell Cancer, Urethral Cancer, Uterine Cancer, Uterine Sarcoma, Vaginal Cancer, Visual Pathway and Hypothalamic Glioma, Vulvar Cancer, Waldenstrom's Macroglobulinemia, Wilms' Tumor, and any other hyperproliferative disease, besides neoplasia, located in an organ system listed above.

[0701] In another preferred embodiment, albumin fusion proteins of the invention and/or polynucleotides encoding albumin fusion proteins of the invention are used to diagnose, prognose, prevent, and/or treat premalignant conditions and to prevent progression to a neoplastic or malignant state, including but not limited to those disorders described above. Such uses are indicated in conditions known or suspected of preceding progression to neoplasia or cancer, in particular, where non-neoplastic cell growth consisting of hyperplasia, metaplasia, or most particularly, dysplasia has occurred (for review of such abnormal growth conditions, see Robbins and Angell, 1976, Basic Pathology, 2d Ed., W. B. Saunders Co., Philadelphia, pp. 68-79.)

[0702] Hyperplasia is a form of controlled cell proliferation, involving an increase in cell number in a tissue or organ, without significant alteration in structure or function. Hyperplastic disorders which can be diagnosed, prognosed, prevented, and/or treated with fusion proteins of the invention and/or polynucleotides encoding albumin fusion proteins of the invention include, but are not limited to, angiofollicular mediastinal lymph node hyperplasia, angiolymphoid hyperplasia with eosinophilia, a typical melanocytic hyperplasia, basal cell hyperplasia, benign giant lymph node hyperplasia, cementum hyperplasia, congenital adrenal hyperplasia, congenital sebaceous hyperplasia, cystic hyperplasia, cystic hyperplasia of the breast, denture hyperplasia, ductal hyperplasia, endometrial hyperplasia, fibromuscular hyperplasia, focal epithelial hyperplasia, gingival hyperplasia, inflammatory fibrous hyperplasia, inflammatory papillary hyperplasia, intravascular papillary endothelial hyperplasia, nodular hyperplasia of prostate, nodular regenerative hyperplasia, pseudoepitheliomatous hyperplasia, senile sebaceous hyperplasia, and verrucous hyperplasia.

[0703] Metaplasia is a form of controlled cell growth in which one type of adult or fully differentiated cell substitutes for another type of adult cell. Metaplastic disorders which can be diagnosed, prognosed, prevented, and/or treated with fusion proteins of the invention and/or polynucleotides encoding albumin fusion proteins of the invention include, but are not limited to, agnogenic myeloid metaplasia, apocrine metaplasia, a typical metaplasia, autoparenchymatous metaplasia, connective tissue metaplasia, epithelial metaplasia, intestinal metaplasia, metaplastic anemia, metaplastic ossification, metaplastic polyps, myeloid metaplasia, primary myeloid metaplasia, secondary myeloid metaplasia, squamous metaplasia, squamous metaplasia of amnion, and symptomatic myeloid metaplasia.

[0704] Dysplasia is frequently a forerunner of cancer, and is found mainly in the epithelia; it is the most disorderly form of non-neoplastic cell growth, involving a loss in individual cell uniformity and in the architectural orientation of cells. Dysplastic cells often have abnormally large, deeply stained nuclei, and exhibit pleomorphism. Dysplasia characteristically occurs where there exists chronic irritation or inflammation. Dysplastic disorders which can be diagnosed, prognosed, prevented, and/or treated with fusion proteins of the invention and/or polynucleotides encoding albumin fusion proteins of the invention include, but are not limited to, anhidrotic ectodermal dysplasia, anterofacial dysplasia, asphyxiating thoracic dysplasia, atriodigital dysplasia, bronchopulmonary dysplasia, cerebral dysplasia, cervical dysplasia, chondroectodermal dysplasia, cleidocranial dysplasia, congenital ectodermal dysplasia, craniodiaphysial dysplasia, craniocarpotarsal dysplasia, craniometaphysial dysplasia, dentin dysplasia, diaphysial dysplasia, ectodermal dysplasia, enamel dysplasia, encephalo-ophthalmic dysplasia, dysplasia epiphysialis hemimelia, dysplasia epiphysialis multiplex, dysplasia epiphysialis punctata, epithelial dysplasia, faciodigitogenital dysplasia, familial fibrous dysplasia of jaws, familial white folded dysplasia, fibromuscular dysplasia, fibrous dysplasia of bone, florid osseous dysplasia, hereditary renal-retinal dysplasia, hidrotic ectodermal dysplasia, hypohidrotic ectodermal dysplasia, lymphopenic thymic dysplasia, mammary dysplasia, mandibulofacial dysplasia, metaphysial dysplasia, Mondini dysplasia, monostotic fibrous dysplasia, mucoepithelial dysplasia, multiple epiphysial dysplasia, oculoauriculovertebral dysplasia, oculodentodigital dysplasia, oculovertebral dysplasia, odontogenic dysplasia, ophthalmomandibulomelic dysplasia, periapical cemental dysplasia, polyostotic fibrous dysplasia, pseudoachondroplastic spondyloepiphysial dysplasia, retinal dysplasia, septo-optic dysplasia, spondyloepiphysial dysplasia, and ventriculoradial dysplasia.

[0705] Additional pre-neoplastic disorders which can be diagnosed, prognosed, prevented, and/or treated with fusion proteins of the invention and/or polynucleotides encoding albumin fusion proteins of the invention include, but are not limited to, benign dysproliferative disorders (e.g., benign tumors, fibrocystic conditions, tissue hypertrophy, intestinal polyps, colon polyps, and esophageal dysplasia), leukoplakia, keratoses, Bowen's disease, Farmer's Skin, solar cheilitis, and solar keratosis.

[0706] In another embodiment, albumin fusion proteins of the invention and/or polynucleotides encoding albumin fusion proteins of the invention, may be used to diagnose and/or prognose disorders associated with the tissue(s) in which the polypeptide of the invention is expressed.

[0707] In another embodiment, albumin fusion proteins of the invention and/or polynucleotides encoding albumin fusion proteins of the invention conjugated to a toxin or a radioactive isotope, as described herein, may be used to treat cancers and neoplasms, including, but not limited to, those described herein. In a further preferred embodiment, albumin fusion proteins of the invention and/or polynucleotides encoding albumin fusion proteins of the invention conjugated to a toxin or a radioactive isotope, as described herein, may be used to treat acute myelogenous leukemia.

[0708] Additionally, fusion proteins of the invention and/or polynucleotides encoding albumin fusion proteins of the invention may affect apoptosis, and therefore, would be useful in treating a number of diseases associated with increased cell survival or the inhibition of apoptosis. For example, diseases associated with increased cell survival or the inhibition of apoptosis that could be diagnosed, prognosed, prevented, and/or treated by polynucleotides, polypeptides, and/or agonists or antagonists of the invention, include cancers (such as follicular lymphomas, carcinomas with p53 mutations, and hormone-dependent tumors, including, but not limited to colon cancer, cardiac tumors, pancreatic cancer, melanoma, retinoblastoma, glioblastoma, lung cancer, intestinal cancer, testicular cancer, stomach cancer, neuroblastoma, myxoma, myoma, lymphoma, endothelioma, osteoblastoma, osteoclastoma, osteosarcoma, chondrosarcoma, adenoma, breast cancer, prostate cancer, Kaposi's sarcoma and ovarian cancer); autoimmune disorders such as, multiple sclerosis, Sjogren's syndrome, Hashimoto's thyroiditis, biliary cirrhosis, Behcet's disease, Crohn's disease, polymyositis, systemic lupus erythematosus and immune-related glomerulonephritis and rheumatoid arthritis) and viral infections (such as herpes viruses, pox viruses and adenoviruses), inflammation, graft v. host disease, acute graft rejection, and chronic graft rejection.

[0709] In preferred embodiments, fusion proteins of the invention and/or polynucleotides encoding albumin fusion proteins of the invention are used to inhibit growth, progression, and/or metastasis of cancers, in particular those listed above.

[0710] Additional diseases or conditions associated with increased cell survival that could be diagnosed, prognosed, prevented, and/or treated by fusion proteins of the invention and/or polynucleotides encoding albumin fusion proteins of the invention, include, but are not limited to, progression, and/or metastases of malignancies and related disorders such as leukemia (including acute leukemias (e.g., acute lymphocytic leukemia, acute myelocytic leukemia (including myeloblastic, promyelocytic, myelomonocytic, monocytic, and erythroleukemia)) and chronic leukemias (e.g., chronic myelocytic (granulocytic) leukemia and chronic lymphocytic leukemia)), polycythemia vera, lymphomas (e.g., Hodgkin's disease and non-Hodgkin's disease), multiple myeloma, Waldenstrom's macroglobulinemia, heavy chain disease, and solid tumors including, but not limited to, sarcomas and carcinomas such as fibrosarcoma, myxosarcoma, liposarcoma, chondrosarcoma, osteogenic sarcoma, chordoma, angiosarcoma, endotheliosarcoma, lymphangiosarcoma, lymphangioendotheliosarcoma, synovioma, mesothelioma, Ewing's tumor, leiomyosarcoma, rhabdomyosarcoma, colon carcinoma, pancreatic cancer, breast cancer, ovarian cancer, prostate cancer, squamous cell carcinoma, basal cell carcinoma, adenocarcinoma, sweat gland carcinoma, sebaceous gland carcinoma, papillary carcinoma, papillary adenocarcinomas, cystadenocarcinoma, medullary carcinoma, bronchogenic carcinoma, renal cell carcinoma, hepatoma, bile duct carcinoma, choriocarcinoma, seminoma, embryonal carcinoma, Wilm's tumor, cervical cancer, testicular tumor, lung carcinoma, small cell lung carcinoma, bladder carcinoma, epithelial carcinoma, glioma, astrocytoma, medulloblastoma, craniopharyngioma, ependymoma, pinealoma, emangioblastoma, acoustic neuroma, oligodendroglioma, menangioma, melanoma, neuroblastoma, and retinoblastoma.

[0711] Diseases associated with increased apoptosis that could be diagnosed, prognosed, prevented, and/or treated by fusion proteins of the invention and/or polynucleotides encoding albumin fusion proteins of the invention, include AIDS; neurodegenerative disorders (such as Alzheimer's disease, Parkinson's disease, amyotrophic lateral sclerosis, retinitis pigmentosa, cerebellar degeneration and brain tumor or prior associated disease); autoimmune disorders (such as, multiple sclerosis, Sjogren's syndrome, Hashimoto's thyroiditis, biliary cirrhosis, Behcet's disease, Crohn's disease, polymyositis, systemic lupus erythematosus and immune-related glomerulonephritis and rheumatoid arthritis) myelodysplastic syndromes (such as aplastic anemia), graft v. host disease, ischemic injury (such as that caused by myocardial infarction, stroke and reperfusion injury), liver injury (e.g., hepatitis related liver injury, ischemia/reperfusion injury, cholestosis (bile duct injury) and liver cancer); toxin-induced liver disease (such as that caused by alcohol), septic shock, cachexia and anorexia.

[0712] Hyperproliferative diseases and/or disorders that could be diagnosed, prognosed, prevented, and/or treated by fusion proteins of the invention and/or polynucleotides encoding albumin fusion proteins of the invention, include, but are not limited to, neoplasms located in the liver, abdomen, bone, breast, digestive system, pancreas, peritoneum, endocrine glands (adrenal, parathyroid, pituitary, testicles, ovary, thymus, thyroid), eye, head and neck, nervous system (central and peripheral), lymphatic system, pelvis, skin, soft tissue, spleen, thorax, and urogenital tract.

[0713] Similarly, other hyperproliferative disorders can also be diagnosed, prognosed, prevented, and/or treated by fusion proteins of the invention and/or polynucleotides encoding albumin fusion proteins of the invention. Examples of such hyperproliferative disorders include, but are not limited to: hypergammaglobulinemia, lymphoproliferative disorders, paraproteinemias, purpura, sarcoidosis, Sezary Syndrome, Waldenstron's macroglobulinemia, Gaucher's Disease, histiocytosis, and any other hyperproliferative disease, besides neoplasia, located in an organ system listed above.

[0714] Another preferred embodiment utilizes polynucleotides encoding albumin fusion proteins of the invention to inhibit aberrant cellular division, by gene therapy using the present invention, and/or protein fusions or fragments thereof.

[0715] Thus, the present invention provides a method for treating cell proliferative disorders by inserting into an abnormally proliferating cell a polynucleotide encoding an albumin fusion protein of the present invention, wherein said polynucleotide represses said expression.

[0716] Another embodiment of the present invention provides a method of treating cell-proliferative disorders in individuals comprising administration of one or more active gene copies of the present invention to an abnormally proliferating cell or cells. In a preferred embodiment, polynucleotides of the present invention is a DNA construct comprising a recombinant expression vector effective in expressing a DNA sequence encoding said polynucleotides. In another preferred embodiment of the present invention, the DNA construct encoding the fusion protein of the present invention is inserted into cells to be treated utilizing a retrovirus, or more preferably an adenoviral vector (See G J. Nabel, et. al., PNAS 1999 96: 324-326, which is hereby incorporated by reference). In a most preferred embodiment, the viral vector is defective and will not transform non-proliferating cells, only proliferating cells. Moreover, in a preferred embodiment, the polynucleotides of the present invention inserted into proliferating cells either alone, or in combination with or fused to other polynucleotides, can then be modulated via an external stimulus (i.e. magnetic, specific small molecule, chemical, or drug administration, etc.), which acts upon the promoter upstream of said polynucleotides to induce expression of the encoded protein product. As such the beneficial therapeutic affect of the present invention may be expressly modulated (i.e. to increase, decrease, or inhibit expression of the present invention) based upon said external stimulus.

[0717] Polynucleotides of the present invention may be useful in repressing expression of oncogenic genes or antigens. By “repressing expression of the oncogenic genes” is intended the suppression of the transcription of the gene, the degradation of the gene transcript (pre-message RNA), the inhibition of splicing, the destruction of the messenger RNA, the prevention of the post-translational modifications of the protein, the destruction of the protein, or the inhibition of the normal function of the protein.

[0718] For local administration to abnormally proliferating cells, polynucleotides of the present invention may be administered by any method known to those of skill in the art including, but not limited to transfection, electroporation, microinjection of cells, or in vehicles such as liposomes, lipofectin, or as naked polynucleotides, or any other method described throughout the specification. The polynucleotide of the present invention may be delivered by known gene delivery systems such as, but not limited to, retroviral vectors (Gilboa, J. Virology 44:845 (1982); Hocke, Nature 320:275 (1986); Wilson, et al., Proc. Natl. Acad. Sci. U.S.A. 85:3014), vaccinia virus system (Chakrabarty et al., Mol. Cell Biol. 5:3403 (1985) or other efficient DNA delivery systems (Yates et al., Nature 313:812 (1985)) known to those skilled in the art. These references are exemplary only and are hereby incorporated by reference. In order to specifically deliver or transfect cells which are abnormally proliferating and spare non-dividing cells, it is preferable to utilize a retrovirus, or adenoviral (as described in the art and elsewhere herein) delivery system known to those of skill in the art. Since host DNA replication is required for retroviral DNA to integrate and the retrovirus will be unable to self replicate due to the lack of the retrovirus genes needed for its life cycle. Utilizing such a retroviral delivery system for polynucleotides of the present invention will target said gene and constructs to abnormally proliferating cells and will spare the non-dividing normal cells.

[0719] The polynucleotides of the present invention may be delivered directly to cell proliferative disorder/disease sites in internal organs, body cavities and the like by use of imaging devices used to guide an injecting needle directly to the disease site. The polynucleotides of the present invention may also be administered to disease sites at the time of surgical intervention.

[0720] By “cell proliferative disease” is meant any human or animal disease or disorder, affecting any one or any combination of organs, cavities, or body parts, which is characterized by single or multiple local abnormal proliferations of cells, groups of cells, or tissues, whether benign or malignant.

[0721] Any amount of the polynucleotides of the present invention may be administered as long as it has a biologically inhibiting effect on the proliferation of the treated cells. Moreover, it is possible to administer more than one of the polynucleotide of the present invention simultaneously to the same site. By “biologically inhibiting” is meant partial or total growth inhibition as well as decreases in the rate of proliferation or growth of the cells. The biologically inhibitory dose may be determined by assessing the effects of the polynucleotides of the present invention on target malignant or abnormally proliferating cell growth in tissue culture, tumor growth in animals and cell cultures, or any other method known to one of ordinary skill in the art.

[0722] Moreover, fusion proteins of the invention and/or polynucleotides encoding albumin fusion proteins of the invention of the present invention are useful in inhibiting the angiogenesis of proliferative cells or tissues, either alone, as a protein fusion, or in combination with other polypeptides directly or indirectly, as described elsewhere herein. In a most preferred embodiment, said anti-angiogenesis effect may be achieved indirectly, for example, through the inhibition of hematopoietic, tumor-specific cells, such as tumor-associated macrophages (See Joseph I B, et al. J Natl Cancer Inst, 90(21):1648-53 (1998), which is hereby incorporated by reference).

[0723] Albumin fusion proteins of the invention and/or polynucleotides encoding albumin fusion proteins of the invention may be useful in inhibiting proliferative cells or tissues through the induction of apoptosis. These fusion protieins and/or polynucleotides may act either directly, or indirectly to induce apoptosis of proliferative cells and tissues, for example in the activation of a death-domain receptor, such as tumor necrosis factor (TNF) receptor-1, CD95 (Fas/APO-1), TNF-receptor-related apoptosis-mediated protein (TRAMP) and TNF-related apoptosis-inducing ligand (TRAIL) receptor-1 and -2 (See Schulze-Osthoff K, et.al., Eur J Biochem 254(3):439-59 (1998), which is hereby incorporated by reference). Moreover, in another preferred embodiment of the present invention, these fusion proteins and/or polynucleotides may induce apoptosis through other mechanisms, such as in the activation of other proteins which will activate apoptosis, or through stimulating the expression of these proteins, either alone or in combination with small molecule drugs or adjuviants, such as apoptonin, galectins, thioredoxins, anti-inflammatory proteins (See for example, Mutat Res 400(1-2):447-55 (1998), Med Hypotheses. 50(5):423-33 (1998), Chem Biol Interact. Apr 24;111-112:23-34 (1998), J Mol Med. 76(6):402-12 (1998), Int J Tissue React;20(1):3-15 (1998), which are all hereby incorporated by reference).

[0724] Albumin fusion proteins of the invention and/or polynucleotides encoding albumin fusion proteins of the invention are useful in inhibiting the metastasis of proliferative cells or tissues. Inhibition may occur as a direct result of administering these albumin fusion proteins and/or polynucleotides, or indirectly, such as activating the expression of proteins known to inhibit metastasis, for example alpha 4 integrins, (See, e.g., Curr Top Microbiol Immunol 1998;231:125-41, which is hereby incorporated by reference). Such thereapeutic affects of the present invention may be achieved either alone, or in combination with small molecule drugs or adjuvants.

[0725] In another embodiment, the invention provides a method of delivering compositions containing the albumin fusion proteins of the invention and/or polynucleotides encoding albumin fusion proteins of the invention to targeted cells expressing the a polypeptide bound by, that binds to, or associates with an albumin fuison protein of the invention. Albumin fusion proteins of the invention may be associated with with heterologous polypeptides, heterologous nucleic acids, toxins, or prodrugs via hydrophobic, hydrophilic, ionic and/or covalent interactions.

[0726] Albumin fusion proteins of the invention are useful in enhancing the immunogenicity and/or antigenicity of proliferating cells or tissues, either directly, such as would occur if the albumin fusion proteins of the invention ‘vaccinated’ the immune response to respond to proliferative antigens and immunogens, or indirectly, such as in activating the expression of proteins known to enhance the immune response (e.g. chemokines), to said antigens and immunogens.

[0727] Renal Disorders

[0728] Albumin fusion proteins of the invention and/or polynucleotides encoding albumin fusion proteins of the invention, may be used to treat, prevent, diagnose, and/or prognose disorders of the renal system. Renal disorders which can be diagnosed, prognosed, prevented, and/or treated with compositions of the invention include, but are not limited to, kidney failure, nephritis, blood vessel disorders of kidney, metabolic and congenital kidney disorders, urinary disorders of the kidney, autoimmune disorders, sclerosis and necrosis, electrolyte imbalance, and kidney cancers.

[0729] Kidney diseases which can be diagnosed, prognosed, prevented, and/or treated with compositions of the invention include, but are not limited to, acute kidney failure, chronic kidney failure, atheroembolic renal failure, end-stage renal disease, inflammatory diseases of the kidney (e.g., acute glomerulonephritis, postinfectious glomerulonephritis, rapidly progressive glomerulonephritis, nephrotic syndrome, membranous glomerulonephritis, familial nephrotic syndrome, membranoproliferative glomerulonephritis I and II, mesangial proliferative glomerulonephritis, chronic glomerulonephritis, acute tubulointerstitial nephritis, chronic tubulointerstitial nephritis, acute post-streptococcal glomerulonephritis (PSGN), pyelonephritis, lupus nephritis, chronic nephritis, interstitial nephritis, and post-streptococcal glomerulonephritis), blood vessel disorders of the kidneys (e.g., kidney infarction, atheroembolic kidney disease, cortical necrosis, malignant nephrosclerosis, renal vein thrombosis, renal underperfusion, renal retinopathy, renal ischemia-reperfusion, renal artery embolism, and renal artery stenosis), and kidney disorders resulting form urinary tract disease (e.g., pyelonephritis, hydronephrosis, urolithiasis (renal lithiasis, nephrolithiasis), reflux nephropathy, urinary tract infections, urinary retention, and acute or chronic unilateral obstructive uropathy.)

[0730] In addition, compositions of the invention can be used to diagnose, prognose, prevent, and/or treat metabolic and congenital disorders of the kidney (e.g., uremia, renal amyloidosis, renal osteodystrophy, renal tubular acidosis, renal glycosuria, nephrogenic diabetes insipidus, cystinuria, Fanconi's syndrome, renal fibrocystic osteosis (renal rickets), Hartnup disease, Bartter's syndrome, Liddle's syndrome, polycystic kidney disease, medullary cystic disease, medullary sponge kidney, Alport's syndrome, nail-patella syndrome, congenital nephrotic syndrome, CRUSH syndrome, horseshoe kidney, diabetic nephropathy, nephrogenic diabetes insipidus, analgesic nephropathy, kidney stones, and membranous nephropathy), and autoimmune disorders of the kidney (e.g., systemic lupus erythematosus (SLE), Goodpasture syndrome, IgA nephropathy, and IgM mesangial proliferative glomerulonephritis).

[0731] Compositions of the invention can also be used to diagnose, prognose, prevent, and/or treat sclerotic or necrotic disorders of the kidney (e.g., glomerulosclerosis, diabetic nephropathy, focal segmental glomerulosclerosis (FSGS), necrotizing glomerulonephritis, and renal papillary necrosis), cancers of the kidney (e.g., nephroma, hypemephroma, nephroblastoma, renal cell cancer, transitional cell cancer, renal adenocarcinoma, squamous cell cancer, and Wilm's tumor), and electrolyte imbalances (e.g., nephrocalcinosis, pyuria, edema, hydronephritis, proteinuria, hyponatremia, hypernatremia, hypokalemia, hyperkalemia, hypocalcemia, hypercalcemia, hypophosphatemia, and hyperphosphatemia).

[0732] Compositions of the invention may be administered using any method known in the art, including, but not limited to, direct needle injection at the delivery site, intravenous injection, topical administration, catheter infusion, biolistic injectors, particle accelerators, gelfoam sponge depots, other commercially available depot materials, osmotic pumps, oral or suppositorial solid pharmaceutical formulations, decanting or topical applications during surgery, aerosol delivery. Such methods are known in the art. Compositions of the invention may be administered as part of a Therapeutic, described in more detail below. Methods of delivering polynucleotides of the invention are described in more detail herein.

[0733] Cardiovascular Disorders

[0734] Albumin fusion proteins of the invention and/or polynucleotides encoding albumin fusion proteins of the invention, may be used to treat, prevent, diagnose, and/or prognose cardiovascular disorders, including, but not limited to, peripheral artery disease, such as limb ischemia.

[0735] Cardiovascular disorders include, but are not limited to, cardiovascular abnormalities, such as arterio-arterial fistula, arterioyenous fistula, cerebral arterioyenous malformations, congenital heart defects, pulmonary atresia, and Scimitar Syndrome. Congenital heart defects include, but are not limited to, aortic coarctation, cor triatriatum, coronary vessel anomalies, crisscross heart, dextrocardia, patent ductus arteriosus, Ebstein's anomaly, Eisenmenger complex, hypoplastic left heart syndrome, levocardia, tetralogy of fallot, transposition of great vessels, double outlet right ventricle, tricuspid atresia, persistent truncus arteriosus, and heart septal defects, such as aortopulmonary septal defect, endocardial cushion defects, Lutembacher's Syndrome, trilogy of Fallot, ventricular heart septal defects.

[0736] Cardiovascular disorders also include, but are not limited to, heart disease, such as arrhythmias, carcinoid heart disease, high cardiac output, low cardiac output, cardiac tamponade, endocarditis (including bacterial), heart aneurysm, cardiac arrest, congestive heart failure, congestive cardiomyopathy, paroxysmal dyspnea, cardiac edema, heart hypertrophy, congestive cardiomyopathy, left ventricular hypertrophy, right ventricular hypertrophy, post-infarction heart rupture, ventricular septal rupture, heart valve diseases, myocardial diseases, myocardial ischemia, pericardial effusion, pericarditis (including constrictive and tuberculous), pneumopericardium, postpericardiotomy syndrome, pulmonary heart disease, rheumatic heart disease, ventricular dysfunction, hyperemia, cardiovascular pregnancy complications, Scimitar Syndrome, cardiovascular syphilis, and cardiovascular tuberculosis.

[0737] Arrhythmias include, but are not limited to, sinus arrhythmia, atrial fibrillation, atrial flutter, bradycardia, extrasystole, Adams-Stokes Syndrome, bundle-branch block, sinoatrial block, long QT syndrome, parasystole, Lown-Ganong-Levine Syndrome, Mahaim-type pre-excitation syndrome, Wolff-Parkinson-White syndrome, sick sinus syndrome, tachycardias, and ventricular fibrillation. Tachycardias include paroxysmal tachycardia, supraventricular tachycardia, accelerated idioventricular rhythm, atrioventricular nodal reentry tachycardia, ectopic atrial tachycardia, ectopic junctional tachycardia, sinoatrial nodal reentry tachycardia, sinus tachycardia, Torsades de Pointes, and ventricular tachycardia.

[0738] Heart valve diseases include, but are not limited to, aortic valve insufficiency, aortic valve stenosis, hear murmurs, aortic valve prolapse, mitral valve prolapse, tricuspid valve prolapse, mitral valve insufficiency, mitral valve stenosis, pulmonary atresia, pulmonary valve insufficiency, pulmonary valve stenosis, tricuspid atresia, tricuspid valve insufficiency, and tricuspid valve stenosis.

[0739] Myocardial diseases include, but are not limited to, alcoholic cardiomyopathy, congestive cardiomyopathy, hypertrophic cardiomyopathy, aortic subvalvular stenosis, pulmonary subvalvular stenosis, restrictive cardiomyopathy, Chagas cardiomyopathy, endocardial fibroelastosis, endomyocardial fibrosis, Kearns Syndrome, myocardial reperfusion injury, and myocarditis.

[0740] Myocardial ischemias include, but are not limited to, coronary disease, such as angina pectoris, coronary aneurysm, coronary arteriosclerosis, coronary thrombosis, coronary vasospasm, myocardial infarction and myocardial stunning.

[0741] Cardiovascular diseases also include vascular diseases such as aneurysms, angiodysplasia, angiomatosis, bacillary angiomatosis, Hippel-Lindau Disease, Klippel-Trenaunay-Weber Syndrome, Sturge-Weber Syndrome, angioneurotic edema, aortic diseases, Takayasu's Arteritis, aortitis, Leriche's Syndrome, arterial occlusive diseases, arteritis, enarteritis, polyarteritis nodosa, cerebrovascular disorders, diabetic angiopathies, diabetic retinopathy, embolisms, thrombosis, erythromelalgia, hemorrhoids, hepatic veno-occlusive disease, hypertension, hypotension, ischemia, peripheral vascular diseases, phlebitis, pulmonary veno-occlusive disease, Raynaud's disease, CREST syndrome, retinal vein occlusion, Scimitar syndrome, superior vena cava syndrome, telangiectasia, atacia telangiectasia, hereditary hemorrhagic telangiectasia, varicocele, varicose veins, varicose ulcer, vasculitis, and venous insufficiency.

[0742] Aneurysms include, but are not limited to, dissecting aneurysms, false aneurysms, infected aneurysms, ruptured aneurysms, aortic aneurysms, cerebral aneurysms, coronary aneurysms, heart aneurysms, and iliac aneurysms.

[0743] Arterial occlusive diseases include, but are not limited to, arteriosclerosis, intermittent claudication, carotid stenosis, fibromuscular dysplasias, mesenteric vascular occlusion, Moyamoya disease, renal artery obstruction, retinal artery occlusion, and thromboangiitis obliterans.

[0744] Cerebrovascular disorders include, but are not limited to, carotid artery diseases, cerebral amyloid angiopathy, cerebral aneurysm, cerebral anoxia, cerebral arteriosclerosis, cerebral arterioyenous malformation, cerebral artery diseases, cerebral embolism and thrombosis, carotid artery thrombosis, sinus thrombosis, Wallenberg's syndrome, cerebral hemorrhage, epidural hematoma, subdural hematoma, subaraxhnoid hemorrhage, cerebral infarction, cerebral ischemia (including transient), subclavian steal syndrome, periventricular leukomalacia, vascular headache, cluster headache, migraine, and vertebrobasilar insufficiency.

[0745] Embolisms include, but are not limited to, air embolisms, amniotic fluid embolisms, cholesterol embolisms, blue toe syndrome, fat embolisms, pulmonary embolisms, and thromoboembolisms. Thrombosis include, but are not limited to, coronary thrombosis, hepatic vein thrombosis, retinal vein occlusion, carotid artery thrombosis, sinus thrombosis, Wallenberg's syndrome, and thrombophlebitis.

[0746] Ischemic disorders include, but are not limited to, cerebral ischemia, ischemic colitis, compartment syndromes, anterior compartment syndrome, myocardial ischemia, reperfusion injuries, and peripheral limb ischemia. Vasculitis includes, but is not limited to, aortitis, arteritis, Behcet's Syndrome, Churg-Strauss Syndrome, mucocutaneous lymph node syndrome, thromboangiitis obliterans, hypersensitivity vasculitis, Schoenlein-Henoch purpura, allergic cutaneous vasculitis, and Wegener's granulomatosis.

[0747] Albumin fusion proteins of the invention and/or polynucleotides encoding albumin fusion proteins of the invention may be administered using any method known in the art, including, but not limited to, direct needle injection at the delivery site, intravenous injection, topical administration, catheter infusion, biolistic injectors, particle accelerators, gelfoam sponge depots, other commercially available depot materials, osmotic pumps, oral or suppositorial solid pharmaceutical formulations, decanting or topical applications during surgery, aerosol delivery. Such methods are known in the art. Methods of delivering polynucleotides are described in more detail herein.

[0748] Respiratory Disorders

[0749] Albumin fusion proteins of the invention and/or polynucleotides encoding albumin fusion proteins of the invention may be used to treat, prevent, diagnose, and/or prognose diseases and/or disorders of the respiratory system.

[0750] Diseases and disorders of the respiratory system include, but are not limited to, nasal vestibulitis, nonallergic rhinitis (e.g., acute rhinitis, chronic rhinitis, atrophic rhinitis, vasomotor rhinitis), nasal polyps, and sinusitis, juvenile angiofibromas, cancer of the nose and juvenile papillomas, vocal cord polyps, nodules (singer's nodules), contact ulcers, vocal cord paralysis, laryngoceles, pharyngitis (e.g., viral and bacterial), tonsillitis, tonsillar cellulitis, parapharyngeal abscess, laryngitis, laryngoceles, and throat cancers (e.g., cancer of the nasopharynx, tonsil cancer, larynx cancer), lung cancer (e.g., squamous cell carcinoma, small cell (oat cell) carcinoma, large cell carcinoma, and adenocarcinoma), allergic disorders (eosinophilic pneumonia, hypersensitivity pneumonitis (e.g., extrinsic allergic alveolitis, allergic interstitial pneumonitis, organic dust pneumoconiosis, allergic bronchopulmonary aspergillosis, asthma, Wegener's granulomatosis (granulomatous vasculitis), Goodpasture's syndrome)), pneumonia (e.g., bacterial pneumonia (e.g., Streptococcus pneumoniae (pneumoncoccal pneumonia), Staphylococcus aureus (staphylococcal pneumonia), Gram-negative bacterial pneumonia (caused by, e.g., Klebsiella and Pseudomas spp.), Mycoplasma pneumoniae pneumonia, Hemophilus influenzae pneumonia, Legionella pneumophila (Legionnaires' disease), and Chlamydia psittaci (Psittacosis)), and viral pneumonia (e.g., influenza, chickenpox (varicella).

[0751] Additional diseases and disorders of the respiratory system include, but are not limited to bronchiolitis, polio (poliomyelitis), croup, respiratory syncytial viral infection, mumps, erythema infectiosum (fifth disease), roseola infantum, progressive rubella panencephalitis, german measles, and subacute sclerosing panencephalitis), fungal pneumonia (e.g., Histoplasmosis, Coccidioidomycosis, Blastomycosis, fungal infections in people with severely suppressed immune systems (e.g., cryptococcosis, caused by Cryptococcus neoformans; aspergillosis, caused by Aspergillus spp.; candidiasis, caused by Candida; and mucormycosis)), Pneumocystis carinii (pneumocystis pneumonia), a typical pneumonias (e.g., Mycoplasma and Chlamydia spp.), opportunistic infection pneumonia, nosocomial pneumonia, chemical pneumonitis, and aspiration pneumonia, pleural disorders (e.g., pleurisy, pleural effusion, and pneumothorax (e.g., simple spontaneous pneumothorax, complicated spontaneous pneumothorax, tension pneumothorax)), obstructive airway diseases (e.g., asthma, chronic obstructive pulmonary disease (COPD), emphysema, chronic or acute bronchitis), occupational lung diseases (e.g., silicosis, black lung (coal workers' pneumoconiosis), asbestosis, berylliosis, occupational asthsma, byssinosis, and benign pneumoconioses), Infiltrative Lung Disease (e.g., pulmonary fibrosis (e.g., fibrosing alveolitis, usual interstitial pneumonia), idiopathic pulmonary fibrosis, desquamative interstitial pneumonia, lymphoid interstitial pneumonia, histiocytosis X (e.g., Letterer-Siwe disease, Hand-Schüller-Christian disease, eosinophilic granuloma), idiopathic pulmonary hemosiderosis, sarcoidosis and pulmonary alveolar proteinosis), Acute respiratory distress syndrome (also called, e.g., adult respiratory distress syndrome), edema, pulmonary embolism, bronchitis (e.g., viral, bacterial), bronchiectasis, atelectasis, lung abscess (caused by, e.g., Staphylococcus aureus or Legionella pneumophila), and cystic fibrosis.

[0752] Anti-Angiogenesis Activity

[0753] The naturally occurring balance between endogenous stimulators and inhibitors of angiogenesis is one in which inhibitory influences predominate. Rastinejad et al., Cell 56:345-355 (1989). In those rare instances in which neovascularization occurs under normal physiological conditions, such as wound healing, organ regeneration, embryonic development, and female reproductive processes, angiogenesis is stringently regulated and spatially and temporally delimited. Under conditions of pathological angiogenesis such as that characterizing solid tumor growth, these regulatory controls fail. Unregulated angiogenesis becomes pathologic and sustains progression of many neoplastic and non-neoplastic diseases. A number of serious diseases are dominated by abnormal neovascularization including solid tumor growth and metastases, arthritis, some types of eye disorders, and psoriasis. See, e.g., reviews by Moses et al., Biotech. 9:630-634 (1991); Folkman et al., N. Engl. J. Med., 333:1757-1763 (1995); Auerbach et al., J. Microvasc. Res. 29:401-411 (1985); Folkman, Advances in Cancer Research, eds. Klein and Weinhouse, Academic Press, New York, pp. 175-203 (1985); Patz, Am. J. Opthalmol. 94:715-743 (1982); and Folkman et al., Science 221:719-725 (1983). In a number of pathological conditions, the process of angiogenesis contributes to the disease state. For example, significant data have accumulated which suggest that the growth of solid tumors is dependent on angiogenesis. Folkman and Klagsbrun, Science 235:442-447 (1987).

[0754] The present invention provides for treatment of diseases or disorders associated with neovascularization by administration of fusion proteins of the invention and/or polynucleotides encoding albumin fusion proteins of the invention. Malignant and metastatic conditions which can be treated with the polynucleotides and polypeptides, or agonists or antagonists of the invention include, but are not limited to, malignancies, solid tumors, and cancers described herein and otherwise known in the art (for a review of such disorders, see Fishman et al., Medicine, 2d Ed., J. B. Lippincott Co., Philadelphia (1985)).Thus, the present invention provides a method of treating an angiogenesis-related disease and/or disorder, comprising administering to an individual in need thereof a therapeutically effective amount of an albumin fusion protein of the invention and/or polynucleotides encoding an albumin fusion protein of the invention. For example, fusion proteins of the invention and/or polynucleotides encoding albumin fusion proteins of the invention may be utilized in a variety of additional methods in order to therapeutically treat a cancer or tumor. Cancers which may be treated with fusion proteins of the invention and/or polynucleotides encoding albumin fusion proteins of the invention include, but are not limited to solid tumors, including prostate, lung, breast, ovarian, stomach, pancreas, larynx, esophagus, testes, liver, parotid, biliary tract, colon, rectum, cervix, uterus, endometrium, kidney, bladder, thyroid cancer; primary tumors and metastases; melanomas; glioblastoma; Kaposi's sarcoma; leiomyosarcoma; non-small cell lung cancer; colorectal cancer; advanced malignancies; and blood born tumors such as leukemias. For example, fusion proteins of the invention and/or polynucleotides encoding albumin fusion proteins of the invention may be delivered topically, in order to treat cancers such as skin cancer, head and neck tumors, breast tumors, and Kaposi's sarcoma.

[0755] Within yet other aspects, fusion proteins of the invention and/or polynucleotides encoding albumin fusion proteins of the invention may be utilized to treat superficial forms of bladder cancer by, for example, intravesical administration. Albumin fusion proteins of the invention and/or polynucleotides encoding albumin fusion proteins of the invention may be delivered directly into the tumor, or near the tumor site, via injection or a catheter. Of course, as the artisan of ordinary skill will appreciate, the appropriate mode of administration will vary according to the cancer to be treated. Other modes of delivery are discussed herein.

[0756] Albumin fusion proteins of the invention and/or polynucleotides encoding albumin fusion proteins of the invention may be useful in treating other disorders, besides cancers, which involve angiogenesis. These disorders include, but are not limited to: benign tumors, for example hemangiomas, acoustic neuromas, neurofibromas, trachomas, and pyogenic granulomas; artheroscleric plaques; ocular angiogenic diseases, for example, diabetic retinopathy, retinopathy of prematurity, macular degeneration, corneal graft rejection, neovascular glaucoma, retrolental fibroplasia, rubeosis, retinoblastoma, uvietis and Pterygia (abnormal blood vessel growth) of the eye; rheumatoid arthritis; psoriasis; delayed wound healing; endometriosis; vasculogenesis; granulations; hypertrophic scars (keloids); nonunion fractures; scleroderma; trachoma; vascular adhesions; myocardial angiogenesis; coronary collaterals; cerebral collaterals; arterioyenous malformations; ischemic limb angiogenesis; Osler-Webber Syndrome; plaque neovascularization; telangiectasia; hemophiliac joints; angiofibroma; fibromuscular dysplasia; wound granulation; Crohn's disease; and atherosclerosis.

[0757] For example, within one aspect of the present invention methods are provided for treating hypertrophic scars and keloids, comprising the step of administering albumin fusion proteins of the invention and/or polynucleotides encoding albumin fusion proteins of the invention to a hypertrophic scar or keloid.

[0758] Within one embodiment of the present invention fusion proteins of the invention and/or polynucleotides encoding albumin fusion proteins of the invention are directly injected into a hypertrophic scar or keloid, in order to prevent the progression of these lesions. This therapy is of particular value in the prophylactic treatment of conditions which are known to result in the development of hypertrophic scars and keloids (e.g., bums), and is preferably initiated after the proliferative phase has had time to progress (approximately 14 days after the initial injury), but before hypertrophic scar or keloid development. As noted above, the present invention also provides methods for treating neovascular diseases of the eye, including for example, corneal neovascularization, neovascular glaucoma, proliferative diabetic retinopathy, retrolental fibroplasia and macular degeneration.

[0759] Moreover, Ocular disorders associated with neovascularization which can be treated with the albumin fusion proteins of the invention and/or polynucleotides encoding albumin fusion proteins of the invention include, but are not limited to: neovascular glaucoma, diabetic retinopathy, retinoblastoma, retrolental fibroplasia, uveitis, retinopathy of prematurity macular degeneration, corneal graft neovascularization, as well as other eye inflammatory diseases, ocular tumors and diseases associated with choroidal or iris neovascularization. See, e.g., reviews by Waltman et al., Am. J. Ophthal. 85:704-710 (1978) and Gartner et al., Surv. Ophthal. 22:291-312 (1978).

[0760] Thus, within one aspect of the present invention methods are provided for treating neovascular diseases of the eye such as corneal neovascularization (including corneal graft neovascularization), comprising the step of administering to a patient a therapeutically effective amount of a compound (e.g., fusion proteins of the invention and/or polynucleotides encoding albumin fusion proteins of the invention) to the cornea, such that the formation of blood vessels is inhibited. Briefly, the cornea is a tissue which normally lacks blood vessels. In certain pathological conditions however, capillaries may extend into the cornea from the pericorneal vascular plexus of the limbus. When the cornea becomes vascularized, it also becomes clouded, resulting in a decline in the patient's visual acuity. Visual loss may become complete if the cornea completely opacitates. A wide variety of disorders can result in corneal neovascularization, including for example, corneal infections (e.g., trachoma, herpes simplex keratitis, leishmaniasis and onchocerciasis), immunological processes (e.g., graft rejection and Stevens-Johnson's syndrome), alkali bums, trauma, inflammation (of any cause), toxic and nutritional deficiency states, and as a complication of wearing contact lenses.

[0761] Within particularly preferred embodiments of the invention, may be prepared for topical administration in saline (combined with any of the preservatives and antimicrobial agents commonly used in ocular preparations), and administered in eyedrop form. The solution or suspension may be prepared in its pure form and administered several times daily. Alternatively, anti-angiogenic compositions, prepared as described above, may also be administered directly to the cornea. Within preferred embodiments, the anti-angiogenic composition is prepared with a muco-adhesive polymer which binds to cornea. Within further embodiments, the anti-angiogenic factors or anti-angiogenic compositions may be utilized as an adjunct to conventional steroid therapy. Topical therapy may also be useful prophylactically in corneal lesions which are known to have a high probability of inducing an angiogenic response (such as chemical burns). In these instances the treatment, likely in combination with steroids, may be instituted immediately to help prevent subsequent complications.

[0762] Within other embodiments, the compounds described above may be injected directly into the corneal stroma by an ophthalmologist under microscopic guidance. The preferred site of injection may vary with the morphology of the individual lesion, but the goal of the administration would be to place the composition at the advancing front of the vasculature (i.e., interspersed between the blood vessels and the normal cornea). In most cases this would involve perilimbic corneal injection to “protect” the cornea from the advancing blood vessels. This method may also be utilized shortly after a corneal insult in order to prophylactically prevent corneal neovascularization. In this situation the material could be injected in the perilimbic cornea interspersed between the corneal lesion and its undesired potential limbic blood supply. Such methods may also be utilized in a similar fashion to prevent capillary invasion of transplanted corneas. In a sustained-release form injections might only be required 2-3 times per year. A steroid could also be added to the injection solution to reduce inflammation resulting from the injection itself.

[0763] Within another aspect of the present invention, methods are provided for treating neovascular glaucoma, comprising the step of administering to a patient a therapeutically effective amount of an albumin fusion protein of the invention and/or polynucleotides encoding an albumin fusion protein of the invention to the eye, such that the formation of blood vessels is inhibited. In one embodiment, the compound may be administered topically to the eye in order to treat early forms of neovascular glaucoma. Within other embodiments, the compound may be implanted by injection into the region of the anterior chamber angle. Within other embodiments, the compound may also be placed in any location such that the compound is continuously released into the aqueous humor. Within another aspect of the present invention, methods are provided for treating proliferative diabetic retinopathy, comprising the step of administering to a patient a therapeutically effective amount of an albumin fusion protein of the invention and/or polynucleotides encoding an albumin fusion protein of the invention to the eyes, such that the formation of blood vessels is inhibited.

[0764] Within particularly preferred embodiments of the invention, proliferative diabetic retinopathy may be treated by injection into the aqueous humor or the vitreous, in order to increase the local concentration of the polynucleotide, polypeptide, antagonist and/or agonist in the retina. Preferably, this treatment should be initiated prior to the acquisition of severe disease requiring photocoagulation.

[0765] Within another aspect of the present invention, methods are provided for treating retrolental fibroplasia, comprising the step of administering to a patient a therapeutically effective amount of an albumin fusion protein of the invention and/or polynucleotides encoding an albumin fusion protein of the invention to the eye, such that the formation of blood vessels is inhibited. The compound may be administered topically, via intravitreous injection and/or via intraocular implants.

[0766] Additionally, disorders which can be treated with fusion proteins of the invention and/or polynucleotides encoding albumin fusion proteins of the invention include, but are not limited to, hemangioma, arthritis, psoriasis, angiofibroma, atherosclerotic plaques, delayed wound healing, granulations, hemophilic joints, hypertrophic scars, nonunion fractures, Osler-Weber syndrome, pyogenic granuloma, scleroderma, trachoma, and vascular adhesions.

[0767] Moreover, disorders and/or states, which can be treated, prevented, diagnosed, and/or prognosed with the the albumin fusion proteins of the invention and/or polynucleotides encoding albumin fusion proteins of the invention of the invention include, but are not limited to, solid tumors, blood born tumors such as leukemias, tumor metastasis, Kaposi's sarcoma, benign tumors, for example hemangiomas, acoustic neuromas, neurofibromas, trachomas, and pyogenic granulomas, rheumatoid arthritis, psoriasis, ocular angiogenic diseases, for example, diabetic retinopathy, retinopathy of prematurity, macular degeneration, corneal graft rejection, neovascular glaucoma, retrolental fibroplasia, rubeosis, retinoblastoma, and uvietis, delayed wound healing, endometriosis, vascluogenesis, granulations, hypertrophic scars (keloids), nonunion fractures, scleroderma, trachoma, vascular adhesions, myocardial angiogenesis, coronary collaterals, cerebral collaterals, arterioyenous malformations, ischemic limb angiogenesis, Osler-Webber Syndrome, plaque neovascularization, telangiectasia, hemophiliac joints, angiofibroma fibromuscular dysplasia, wound granulation, Crohn's disease, atherosclerosis, birth control agent by preventing vascularization required for embryo implantation controlling menstruation, diseases that have angiogenesis as a pathologic consequence such as cat scratch disease (Rochele minalia quintosa), ulcers (Helicobacter pylori), Bartonellosis and bacillary angiomatosis.

[0768] In one aspect of the birth control method, an amount of the compound sufficient to block embryo implantation is administered before or after intercourse and fertilization have occurred, thus providing an effective method of birth control, possibly a “morning after” method. Albumin fusion proteins of the invention and/or polynucleotides encoding albumin fusion proteins of the invention may also be used in controlling menstruation or administered as either a peritoneal lavage fluid or for peritoneal implantation in the treatment of endometriosis.

[0769] Albumin fusion proteins of the invention and/or polynucleotides encoding albumin fusion proteins of the invention may be incorporated into surgical sutures in order to prevent stitch granulomas.

[0770] Albumin fusion proteins of the invention and/or polynucleotides encoding albumin fusion proteins of the invention may be utilized in a wide variety of surgical procedures. For example, within one aspect of the present invention a compositions (in the form of, for example, a spray or film) may be utilized to coat or spray an area prior to removal of a tumor, in order to isolate normal surrounding tissues from malignant tissue, and/or to prevent the spread of disease to surrounding tissues. Within other aspects of the present invention, compositions (e.g., in the form of a spray) may be delivered via endoscopic procedures in order to coat tumors, or inhibit angiogenesis in a desired locale. Within yet other aspects of the present invention, surgical meshes which have been coated with anti-angiogenic compositions of the present invention may be utilized in any procedure wherein a surgical mesh might be utilized. For example, within one embodiment of the invention a surgical mesh laden with an anti-angiogenic composition may be utilized during abdominal cancer resection surgery (e.g., subsequent to colon resection) in order to provide support to the structure, and to release an amount of the anti-angiogenic factor.

[0771] Within further aspects of the present invention, methods are provided for treating tumor excision sites, comprising administering albumin fusion proteins of the invention and/or polynucleotides encoding albumin fusion proteins of the invention to the resection margins of a tumor subsequent to excision, such that the local recurrence of cancer and the formation of new blood vessels at the site is inhibited. Within one embodiment of the invention, the anti-angiogenic compound is administered directly to the tumor excision site (e.g., applied by swabbing, brushing or otherwise coating the resection margins of the tumor with the anti-angiogenic compound). Alternatively, the anti-angiogenic compounds may be incorporated into known surgical pastes prior to administration. Within particularly preferred embodiments of the invention, the anti-angiogenic compounds are applied after hepatic resections for malignancy, and after neurosurgical operations.

[0772] Within one aspect of the present invention, fusion proteins of the invention and/or polynucleotides encoding albumin fusion proteins of the invention may be administered to the resection margin of a wide variety of tumors, including for example, breast, colon, brain and hepatic tumors. For example, within one embodiment of the invention, anti-angiogenic compounds may be administered to the site of a neurological tumor subsequent to excision, such that the formation of new blood vessels at the site are inhibited.

[0773] The albumin fusion proteins of the invention and/or polynucleotides encoding albumin fusion proteins of the invention may also be administered along with other anti-angiogenic factors. Representative examples of other anti-angiogenic factors include: Anti-Invasive Factor, retinoic acid and derivatives thereof, paclitaxel, Suramin, Tissue Inhibitor of Metalloproteinase-1, Tissue Inhibitor of Metalloproteinase-2, Plasminogen Activator Inhibitor-1, Plasminogen Activator Inhibitor-2, and various forms of the lighter “d group” transition metals.

[0774] Lighter “d group” transition metals include, for example, vanadium, molybdenum, tungsten, titanium, niobium, and tantalum species. Such transition metal species may form transition metal complexes. Suitable complexes of the above-mentioned transition metal species include oxo transition metal complexes.

[0775] Representative examples of vanadium complexes include oxo vanadium complexes such as vanadate and vanadyl complexes. Suitable vanadate complexes include metavanadate and orthovanadate complexes such as, for example, ammonium metavanadate, sodium metavanadate, and sodium orthovanadate. Suitable vanadyl complexes include, for example, vanadyl acetylacetonate and vanadyl sulfate including vanadyl sulfate hydrates such as vanadyl sulfate mono- and trihydrates.

[0776] Representative examples of tungsten and molybdenum complexes also include oxo complexes. Suitable oxo tungsten complexes include tungstate and tungsten oxide complexes. Suitable tungstate complexes include ammonium tungstate, calcium tungstate, sodium tungstate dihydrate, and tungstic acid. Suitable tungsten oxides include tungsten (IV) oxide and tungsten (VI) oxide. Suitable oxo molybdenum complexes include molybdate, molybdenum oxide, and molybdenyl complexes. Suitable molybdate complexes include ammonium molybdate and its hydrates, sodium molybdate and its hydrates, and potassium molybdate and its hydrates. Suitable molybdenum oxides include molybdenum (VI) oxide, molybdenum (VI) oxide, and molybdic acid. Suitable molybdenyl complexes include, for example, molybdenyl acetylacetonate. Other suitable tungsten and molybdenum complexes include hydroxo derivatives derived from, for example, glycerol, tartaric acid, and sugars.

[0777] A wide variety of other anti-angiogenic factors may also be utilized within the context of the present invention. Representative examples include platelet factor 4; protamine sulphate; sulphated chitin derivatives (prepared from queen crab shells), (Murata et al., Cancer Res. 51:22-26, 1991); Sulphated Polysaccharide Peptidoglycan Complex (SP-PG) (the function of this compound may be enhanced by the presence of steroids such as estrogen, and tamoxifen citrate); Staurosporine; modulators of matrix metabolism, including for example, proline analogs, cishydroxyproline, d,L-3,4-dehydroproline, Thiaproline, alpha,alpha-dipyridyl, aminopropionitrile fumarate; 4-propyl-5-(4-pyridinyl)-2(3H)-oxazolone; Methotrexate; Mitoxantrone; Heparin; Interferons; 2 Macroglobulin-serum; ChIMP-3 (Pavloff et al., J. Bio. Chem. 267:17321-17326, (1992)); Chymostatin (Tomkinson et al., Biochem J. 286:475-480, (1992)); Cyclodextrin Tetradecasulfate; Eponemycin; Camptothecin; Fumagillin (Ingber et al., Nature 348:555-557, 1990); Gold Sodium Thiomalate (“GST”; Matsubara and Ziff, J. Clin. Invest. 79:1440-1446, (1987)); anticollagenase-serum; alpha2-antiplasmin (Holmes et al., J. Biol. Chem. 262(4):1659-1664, (1987)); Bisantrene (National Cancer Institute); Lobenzarit disodium (N-(2)-carboxyphenyl-4-chloroanthronilic acid disodium or “CCA”; Takeuchi et al., Agents Actions 36:312-316, (1992)); Thalidomide; Angostatic steroid; AGM-1470; carboxynaminolmidazole; and metalloproteinase inhibitors such as BB94.

[0778] Diseases at the Cellular Level

[0779] Diseases associated with increased cell survival or the inhibition of apoptosis that could be treated, prevented, diagnosed, and/or prognosed using fusion proteins of the invention and/or polynucleotides encoding albumin fusion proteins of the invention, include cancers (such as follicular lymphomas, carcinomas with p53 mutations, and hormone-dependent tumors, including, but not limited to colon cancer, cardiac tumors, pancreatic cancer, melanoma, retinoblastoma, glioblastoma, lung cancer, intestinal cancer, testicular cancer, stomach cancer, neuroblastoma, myxoma, myoma, lymphoma, endothelioma, osteoblastoma, osteoclastoma, osteosarcoma, chondrosarcoma, adenoma, breast cancer, prostate cancer, Kaposi's sarcoma and ovarian cancer); autoimmune disorders (such as, multiple sclerosis, Sjogren's syndrome, Hashimoto's thyroiditis, biliary cirrhosis, Behcet's disease, Crohn's disease, polymyositis, systemic lupus erythematosus and immune-related glomerulonephritis and rheumatoid arthritis) and viral infections (such as herpes viruses, pox viruses and adenoviruses), inflammation, graft v. host disease, acute graft rejection, and chronic graft rejection.

[0780] In preferred embodiments, fusion proteins of the invention and/or polynucleotides encoding albumin fusion proteins of the invention are used to inhibit growth, progression, and/or metasis of cancers, in particular those listed above.

[0781] Additional diseases or conditions associated with increased cell survival that could be treated or detected by fusion proteins of the invention and/or polynucleotides encoding albumin fusion proteins of the invention include, but are not limited to, progression, and/or metastases of malignancies and related disorders such as leukemia (including acute leukemias (e.g., acute lymphocytic leukemia, acute myelocytic leukemia (including myeloblastic, promyelocytic, myelomonocytic, monocytic, and erythroleukemia)) and chronic leukemias (e.g., chronic myelocytic (granulocytic) leukemia and chronic lymphocytic leukemia)), polycythemia vera, lymphomas (e.g., Hodgkin's disease and non-Hodgkin's disease), multiple myeloma, Waldenstrom's macroglobulinemia, heavy chain disease, and solid tumors including, but not limited to, sarcomas and carcinomas such as fibrosarcoma, myxosarcoma, liposarcoma, chondrosarcoma, osteogenic sarcoma, chordoma, angiosarcoma, endotheliosarcoma, lymphangiosarcoma, lymphangioendotheliosarcoma, synovioma, mesothelioma, Ewing's tumor, leiomyosarcoma, rhabdomyosarcoma, colon carcinoma, pancreatic cancer, breast cancer, ovarian cancer, prostate cancer, squamous cell carcinoma, basal cell carcinoma, adenocarcinoma, sweat gland carcinoma, sebaceous gland carcinoma, papillary carcinoma, papillary adenocarcinomas, cystadenocarcinoma, medullary carcinoma, bronchogenic carcinoma, renal cell carcinoma, hepatoma, bile duct carcinoma, choriocarcinoma, seminoma, embryonal carcinoma, Wilm's tumor, cervical cancer, testicular tumor, lung carcinoma, small cell lung carcinoma, bladder carcinoma, epithelial carcinoma, glioma, astrocytoma, medulloblastoma, craniopharyngioma, ependymoma, pinealoma, hemangioblastoma, acoustic neuroma, oligodendroglioma, menangioma, melanoma, neuroblastoma, and retinoblastoma.

[0782] Diseases associated with increased apoptosis that could be treated, prevented, diagnosed, and/or prognesed using fusion proteins of the invention and/or polynucleotides encoding albumin fusion proteins of the invention, include, but are not limited to, AIDS; neurodegenerative disorders (such as Alzheimer's disease, Parkinson's disease, Amyotrophic lateral sclerosis, Retinitis pigmentosa, Cerebellar degeneration and brain tumor or prior associated disease); autoimmune disorders (such as, multiple sclerosis, Sjogren's syndrome, Hashimoto's thyroiditis, biliary cirrhosis, Behcet's disease, Crohn's disease, polymyositis, systemic lupus erythematosus and immune-related glomerulonephritis and rheumatoid arthritis) myelodysplastic syndromes (such as aplastic anemia), graft v. host disease, ischemic injury (such as that caused by myocardial infarction, stroke and reperfusion injury), liver injury (e.g., hepatitis related liver injury, ischemia/reperfusion injury, cholestosis (bile duct injury) and liver cancer); toxin-induced liver disease (such as that caused by alcohol), septic shock, cachexia and anorexia.

[0783] Wound Healing and Epithelial Cell Proliferation

[0784] In accordance with yet a further aspect of the present invention, there is provided a process for utilizing fusion proteins of the invention and/or polynucleotides encoding albumin fusion proteins of the invention, for therapeutic purposes, for example, to stimulate epithelial cell proliferation and basal keratinocytes for the purpose of wound healing, and to stimulate hair follicle production and healing of dermal wounds. Albumin fusion proteins of the invention and/or polynucleotides encoding albumin fusion proteins of the invention, may be clinically useful in stimulating wound healing including surgical wounds, excisional wounds, deep wounds involving damage of the dermis and epidermis, eye tissue wounds, dental tissue wounds, oral cavity wounds, diabetic ulcers, dermal ulcers, cubitus ulcers, arterial ulcers, venous stasis ulcers, burns resulting from heat exposure or chemicals, and other abnormal wound healing conditions such as uremia, malnutrition, vitamin deficiencies and complications associated with systemic treatment with steroids, radiation therapy and antineoplastic drugs and antimetabolites. Albumin fusion proteins of the invention and/or polynucleotides encoding albumin fusion proteins of the invention, could be used to promote dermal reestablishment subsequent to dermal loss

[0785] Albumin fusion proteins of the invention and/or polynucleotides encoding albumin fusion proteins of the invention, could be used to increase the adherence of skin grafts to a wound bed and to stimulate re-epithelialization from the wound bed. The following are types of grafts that fusion proteins of the invention and/or polynucleotides encoding albumin fusion proteins of the invention, could be used to increase adherence to a wound bed: autografts, artificial skin, allografts, autodermic graft, autoepdermic grafts, avacular grafts, Blair-Brown grafts, bone graft, brephoplastic grafts, cutis graft, delayed graft, dermic graft, epidermic graft, fascia graft, full thickness graft, heterologous graft, xenograft, homologous graft, hyperplastic graft, lamellar graft, mesh graft, mucosal graft, Ollier-Thiersch graft, omenpal graft, patch graft, pedicle graft, penetrating graft, split skin graft, thick split graft. Albumin fusion proteins of the invention and/or polynucleotides encoding albumin fusion proteins of the invention, can be used to promote skin strength and to improve the appearance of aged skin.

[0786] It is believed that fusion proteins of the invention and/or polynucleotides encoding albumin fusion proteins of the invention, will also produce changes in hepatocyte proliferation, and epithelial cell proliferation in the lung, breast, pancreas, stomach, small intestine, and large intestine. Albumin fusion proteins of the invention and/or polynucleotides encoding albumin fusion proteins of the invention, could promote proliferation of epithelial cells such as sebocytes, hair follicles, hepatocytes, type II pneumocytes, mucin-producing goblet cells, and other epithelial cells and their progenitors contained within the skin, lung, liver, and gastrointestinal tract. Albumin fusion proteins of the invention and/or polynucleotides encoding albumin fusion proteins of the invention, may promote proliferation of endothelial cells, keratinocytes, and basal keratinocytes.

[0787] Albumin fusion proteins of the invention and/or polynucleotides encoding albumin fusion proteins of the invention, could also be used to reduce the side effects of gut toxicity that result from radiation, chemotherapy treatments or viral infections. Albumin fusion proteins of the invention and/or polynucleotides encoding albumin fusion proteins of the invention, may have a cytoprotective effect on the small intestine mucosa. Albumin fusion proteins of the invention and/or polynucleotides encoding albumin fusion proteins of the invention, may also stimulate healing of mucositis (mouth ulcers) that result from chemotherapy and viral infections.

[0788] Albumin fusion proteins of the invention and/or polynucleotides encoding albumin fusion proteins of the invention, could further be used in full regeneration of skin in full and partial thickness skin defects, including bums, (i.e., repopulation of hair follicles, sweat glands, and sebaceous glands), treatment of other skin defects such as psoriasis. Albumin fusion proteins of the invention and/or polynucleotides encoding albumin fusion proteins of the invention, could be used to treat epidermolysis bullosa, a defect in adherence of the epidermis to the underlying dermis which results in frequent, open and painful blisters by accelerating reepithelialization of these lesions. Albumin fusion proteins of the invention and/or polynucleotides encoding albumin fusion proteins of the invention, could also be used to treat gastric and doudenal ulcers and help heal by scar formation of the mucosal lining and regeneration of glandular mucosa and duodenal mucosal lining more rapidly. Inflammatory bowel diseases, such as Crohn's disease and ulcerative colitis, are diseases which result in destruction of the mucosal surface of the small or large intestine, respectively. Thus, fusion proteins of the invention and/or polynucleotides encoding albumin fusion proteins of the invention, could be used to promote the resurfacing of the mucosal surface to aid more rapid healing and to prevent progression of inflammatory bowel disease. Treatment with fusion proteins of the invention and/or polynucleotides encoding albumin fusion proteins of the invention, is expected to have a significant effect on the production of mucus throughout the gastrointestinal tract and could be used to protect the intestinal mucosa from injurious substances that are ingested or following surgery. Albumin fusion proteins of the invention and/or polynucleotides encoding albumin fusion proteins of the invention, could be used to treat diseases associate with the under expression.

[0789] Moreover, fusion proteins of the invention and/or polynucleotides encoding albumin fusion proteins of the invention, could be used to prevent and heal damage to the lungs due to various pathological states. Albumin fusion proteins of the invention and/or polynucleotides encoding albumin fusion proteins of the invention, which could stimulate proliferation and differentiation and promote the repair of alveoli and brochiolar epithelium to prevent or treat acute or chronic lung damage. For example, emphysema, which results in the progressive loss of aveoli, and inhalation injuries, i.e., resulting from smoke inhalation and bums, that cause necrosis of the bronchiolar epithelium and alveoli could be effectively treated using polynucleotides or polypeptides, agonists or antagonists of the present invention. Also fusion proteins of the invention and/or polynucleotides encoding albumin fusion proteins of the invention, could be used to stimulate the proliferation of and differentiation of type II pneumocytes, which may help treat or prevent disease such as hyaline membrane diseases, such as infant respiratory distress syndrome and bronchopulmonary displasia, in premature infants.

[0790] Albumin fusion proteins of the invention and/or polynucleotides encoding albumin fusion proteins of the invention, could stimulate the proliferation and differentiation of hepatocytes and, thus, could be used to alleviate or treat liver diseases and pathologies such as fulminant liver failure caused by cirrhosis, liver damage caused by viral hepatitis and toxic substances (i.e., acetaminophen, carbon tetraholoride and other hepatotoxins known in the art).

[0791] In addition, fusion proteins of the invention and/or polynucleotides encoding albumin fusion proteins of the invention, could be used treat or prevent the onset of diabetes mellitus. In patients with newly diagnosed Types I and II diabetes, where some islet cell function remains, fusion proteins of the invention and/or polynucleotides encoding albumin fusion proteins of the invention, could be used to maintain the islet function so as to alleviate, delay or prevent permanent manifestation of the disease. Also, fusion proteins of the invention and/or polynucleotides encoding albumin fusion proteins of the invention, could be used as an auxiliary in islet cell transplantation to improve or promote islet cell function.

[0792] Neural Activity and Neurological Diseases

[0793] The albumin fusion proteins of the invention and/or polynucleotides encoding albumin fusion proteins of the invention may be used for the diagnosis and/or treatment of diseases, disorders, damage or injury of the brain and/or nervous system. Nervous system disorders that can be treated with the compositions of the invention (e.g., fusion proteins of the invention and/or polynucleotides encoding albumin fusion proteins of the invention), include, but are not limited to, nervous system injuries, and diseases or disorders which result in either a disconnection of axons, a diminution or degeneration of neurons, or demyelination. Nervous system lesions which may be treated in a patient (including human and non-human mammalian patients) according to the methods of the invention, include but are not limited to, the following lesions of either the central (including spinal cord, brain) or peripheral nervous systems: (1) ischemic lesions, in which a lack of oxygen in a portion of the nervous system results in neuronal injury or death, including cerebral infarction or ischemia, or spinal cord infarction or ischemia; (2) traumatic lesions, including lesions caused by physical injury or associated with surgery, for example, lesions which sever a portion of the nervous system, or compression injuries; (3) malignant lesions, in which a portion of the nervous system is destroyed or injured by malignant tissue which is either a nervous system associated malignancy or a malignancy derived from non-nervous system tissue; (4) infectious lesions, in which a portion of the nervous system is destroyed or injured as a result of infection, for example, by an abscess or associated with infection by human immunodeficiency virus, herpes zoster, or herpes simplex virus or with Lyme disease, tuberculosis, or syphilis; (5) degenerative lesions, in which a portion of the nervous system is destroyed or injured as a result of a degenerative process including but not limited to, degeneration associated with Parkinson's disease, Alzheimer's disease, Huntington's chorea, or amyotrophic lateral sclerosis (ALS); (6) lesions associated with nutritional diseases or disorders, in which a portion of the nervous system is destroyed or injured by a nutritional disorder or disorder of metabolism including, but not limited to, vitamin B12 deficiency, folic acid deficiency, Wernicke disease, tobacco-alcohol amblyopia, Marchiafava-Bignami disease (primary degeneration of the corpus callosum), and alcoholic cerebellar degeneration; (7) neurological lesions associated with systemic diseases including, but not limited to, diabetes (diabetic neuropathy, Bell's palsy), systemic lupus erythematosus, carcinoma, or sarcoidosis; (8) lesions caused by toxic substances including alcohol, lead, or particular neurotoxins; and (9) demyelinated lesions in which a portion of the nervous system is destroyed or injured by a demyelinating disease including, but not limited to, multiple sclerosis, human immunodeficiency virus-associated myelopathy, transverse myelopathy or various etiologies, progressive multifocal leukoencephalopathy, and central pontine myelinolysis.

[0794] In one embodiment, the albumin fusion proteins of the invention and/or polynucleotides encoding albumin fusion proteins of the invention are used to protect neural cells from the damaging effects of hypoxia. In a further preferred embodiment, the albumin fusion proteins of the invention and/or polynucleotides encoding albumin fusion proteins of the invention are used to protect neural cells from the damaging effects of cerebral hypoxia. According to this embodiment, the compositions of the invention are used to treat or prevent neural cell injury associated with cerebral hypoxia. In one non-exclusive aspect of this embodiment, the albumin fusion proteins of the invention and/or polynucleotides encoding albumin fusion proteins of the invention, are used to treat or prevent neural cell injury associated with cerebral ischemia. In another non-exclusive aspect of this embodiment, the albumin fusion proteins of the invention and/or polynucleotides encoding albumin fusion proteins of the invention are used to treat or prevent neural cell injury associated with cerebral infarction.

[0795] In another preferred embodiment, albumin fusion proteins of the invention and/or polynucleotides encoding albumin fusion proteins of the invention are used to treat or prevent neural cell injury associated with a stroke. In a specific embodiment, albumin fusion proteins of the invention and/or polynucleotides encoding albumin fusion proteins of the invention are used to treat or prevent cerebral neural cell injury associated with a stroke.

[0796] In another preferred embodiment, albumin fusion proteins of the invention and/or polynucleotides encoding albumin fusion proteins of the invention are used to treat or prevent neural cell injury associated with a heart attack. In a specific embodiment, albumin fusion proteins of the invention and/or polynucleotides encoding albumin fusion proteins of the invention are used to treat or prevent cerebral neural cell injury associated with a heart attack.

[0797] The compositions of the invention which are useful for treating or preventing a nervous system disorder may be selected by testing for biological activity in promoting the survival or differentiation of neurons. For example, and not by way of limitation, compositions of the invention which elicit any of the following effects may be useful according to the invention: (1) increased survival time of neurons in culture either in the presence or absence of hypoxia or hypoxic conditions; (2) increased sprouting of neurons in culture or in vivo; (3) increased production of a neuron-associated molecule in culture or in vivo, e.g., choline acetyltransferase or acetylcholinesterase with respect to motor neurons; or (4) decreased symptoms of neuron dysfunction in vivo. Such effects may be measured by any method known in the art. In preferred, non-limiting embodiments, increased survival of neurons may routinely be measured using a method set forth herein or otherwise known in the art, such as, for example, in Zhang et al., Proc Natl Acad Sci USA 97:3637-42 (2000) or in Arakawa et al., J. Neurosci., 10:3507-15 (1990); increased sprouting of neurons may be detected by methods known in the art, such as, for example, the methods set forth in Pestronk et al., Exp. Neurol., 70:65-82 (1980), or Brown et al., Ann. Rev. Neurosci., 4:17-42 (1981); increased production of neuron-associated molecules may be measured by bioassay, enzymatic assay, antibody binding, Northern blot assay, etc., using techniques known in the art and depending on the molecule to be measured; and motor neuron dysfunction may be measured by assessing the physical manifestation of motor neuron disorder, e.g., weakness, motor neuron conduction velocity, or functional disability.

[0798] In specific embodiments, motor neuron disorders that may be treated according to the invention include, but are not limited to, disorders such as infarction, infection, exposure to toxin, trauma, surgical damage, degenerative disease or malignancy that may affect motor neurons as well as other components of the nervous system, as well as disorders that selectively affect neurons such as amyotrophic lateral sclerosis, and including, but not limited to, progressive spinal muscular atrophy, progressive bulbar palsy, primary lateral sclerosis, infantile and juvenile muscular atrophy, progressive bulbar paralysis of childhood (Fazio-Londe syndrome), poliomyelitis and the post polio syndrome, and Hereditary Motorsensory Neuropathy (Charcot-Marie-Tooth Disease).

[0799] Further, fusion proteins of the invention and/or polynucleotides encoding albumin fusion proteins of the invention may play a role in neuronal survival; synapse formation; conductance; neural differentiation, etc. Thus, compositions of the invention (including fusion proteins of the invention and/or polynucleotides encoding albumin fusion proteins of the invention) may be used to diagnose and/or treat or prevent diseases or disorders associated with these roles, including, but not limited to, learning and/or cognition disorders. The compositions of the invention may also be useful in the treatment or prevention of neurodegenerative disease states and/or behavioural disorders. Such neurodegenerative disease states and/or behavioral disorders include, but are not limited to, Alzheimer's Disease, Parkinson's Disease, Huntington's Disease, Tourette Syndrome, schizophrenia, mania, dementia, paranoia, obsessive compulsive disorder, panic disorder, learning disabilities, ALS, psychoses, autism, and altered behaviors, including disorders in feeding, sleep patterns, balance, and perception. In addition, compositions of the invention may also play a role in the treatment, prevention and/or detection of developmental disorders associated with the developing embryo, or sexually-linked disorders.

[0800] Additionally, fusion proteins of the invention and/or polynucleotides encoding albumin fusion proteins of the invention, may be useful in protecting neural cells from diseases, damage, disorders, or injury, associated with cerebrovascular disorders including, but not limited to, carotid artery diseases (e.g., carotid artery thrombosis, carotid stenosis, or Moyamoya Disease), cerebral amyloid angiopathy, cerebral aneurysm, cerebral anoxia, cerebral arteriosclerosis, cerebral arterioyenous malformations, cerebral artery diseases, cerebral embolism and thrombosis (e.g., carotid artery thrombosis, sinus thrombosis, or Wallenberg's Syndrome), cerebral hemorrhage (e.g., epidural or subdural hematoma, or subarachnoid hemorrhage), cerebral infarction, cerebral ischemia (e.g., transient cerebral ischemia, Subclavian Steal Syndrome, or vertebrobasilar insufficiency), vascular dementia (e.g., multi-infarct), leukomalacia, periventricular, and vascular headache (e.g., cluster headache or migraines).

[0801] In accordance with yet a further aspect of the present invention, there is provided a process for utilizing fusion proteins of the invention and/or polynucleotides encoding albumin fusion proteins of the invention, for therapeutic purposes, for example, to stimulate neurological cell proliferation and/or differentiation. Therefore, fusion proteins of the invention and/or polynucleotides encoding albumin fusion proteins of the invention may be used to treat and/or detect neurologic diseases. Moreover, fusion proteins of the invention and/or polynucleotides encoding albumin fusion proteins of the invention, can be used as a marker or detector of a particular nervous system disease or disorder.

[0802] Examples of neurologic diseases which can be treated or detected with fusion proteins of the invention and/or polynucleotides encoding albumin fusion proteins of the invention include, brain diseases, such as metabolic brain diseases which includes phenylketonuria such as maternal phenylketonuria, pyruvate carboxylase deficiency, pyruvate dehydrogenase complex deficiency, Wernicke's Encephalopathy, brain edema, brain neoplasms such as cerebellar neoplasms which include infratentorial neoplasms, cerebral ventricle neoplasms such as choroid plexus neoplasms, hypothalamic neoplasms, supratentorial neoplasms, canavan disease, cerebellar diseases such as cerebellar ataxia which include spinocerebellar degeneration such as ataxia telangiectasia, cerebellar dyssynergia, Friederich's Ataxia, Machado-Joseph Disease, olivopontocerebellar atrophy, cerebellar neoplasms such as infratentorial neoplasms, diffuse cerebral sclerosis such as encephalitis periaxialis, globoid cell leukodystrophy, metachromatic leukodystrophy and subacute sclerosing panencephalitis.

[0803] Additional neurologic diseases which can be treated or detected with fusion proteins of the invention and/or polynucleotides encoding albumin fusion proteins of the invention include cerebrovascular disorders (such as carotid artery diseases which include carotid artery thrombosis, carotid stenosis and Moyamoya Disease), cerebral amyloid angiopathy, cerebral aneurysm, cerebral anoxia, cerebral arteriosclerosis, cerebral arterioyenous malformations, cerebral artery diseases, cerebral embolism and thrombosis such as carotid artery thrombosis, sinus thrombosis and Wallenberg's Syndrome, cerebral hemorrhage such as epidural hematoma, subdural hematoma and subarachnoid hemorrhage, cerebral infarction, cerebral ischemia such as transient cerebral ischemia, Subclavian Steal Syndrome and vertebrobasilar insufficiency, vascular dementia such as multi-infarct dementia, periventricular leukomalacia, vascular headache such as cluster headache and migraine.

[0804] Additional neurologic diseases which can be treated or detected with fusion proteins of the invention and/or polynucleotides encoding albumin fusion proteins of the invention include dementia such as AIDS Dementia Complex, presenile dementia such as Alzheimer's Disease and Creutzfeldt-Jakob Syndrome, senile dementia such as Alzheimer's Disease and progressive supranuclear palsy, vascular dementia such as multi-infarct dementia, encephalitis which include encephalitis periaxialis, viral encephalitis such as epidemic encephalitis, Japanese Encephalitis, St. Louis Encephalitis, tick-borne encephalitis and West Nile Fever, acute disseminated encephalomyelitis, meningoencephalitis such as uveomeningoencephalitic syndrome, Postencephalitic Parkinson Disease and subacute sclerosing panencephalitis, encephalomalacia such as periventricular leukomalacia, epilepsy such as generalized epilepsy which includes infantile spasms, absence epilepsy, myoclonic epilepsy which includes MERRF Syndrome, tonic-clonic epilepsy, partial epilepsy such as complex partial epilepsy, frontal lobe epilepsy and temporal lobe epilepsy, post-traumatic epilepsy, status epilepticus such as Epilepsia Partialis Continua, and Hallervorden-Spatz Syndrome.

[0805] Additional neurologic diseases which can be treated or detected with fusion proteins of the invention and/or polynucleotides encoding albumin fusion proteins of the invention include hydrocephalus such as Dandy-Walker Syndrome and normal pressure hydrocephalus, hypothalamic diseases such as hypothalamic neoplasms, cerebral malaria, narcolepsy which includes cataplexy, bulbar poliomyelitis, cerebri pseudotumor, Rett Syndrome, Reye's Syndrome, thalamic diseases, cerebral toxoplasmosis, intracranial tuberculoma and Zellweger Syndrome, central nervous system infections such as AIDS Dementia Complex, Brain Abscess, subdural empyema, encephalomyelitis such as Equine Encephalomyelitis, Venezuelan Equine Encephalomyelitis, Necrotizing Hemorrhagic Encephalomyelitis, Visna, and cerebral malaria.

[0806] Additional neurologic diseases which can be treated or detected with fusion proteins of the invention and/or polynucleotides encoding albumin fusion proteins of the invention include meningitis such as arachnoiditis, aseptic meningtitis such as viral meningtitis which includes lymphocytic choriomeningitis, Bacterial meningtitis which includes Haemophilus Meningtitis, Listeria Meningtitis, Meningococcal Meningtitis such as Waterhouse-Friderichsen Syndrome, Pneumococcal Meningtitis and meningeal tuberculosis, fungal meningitis such as Cryptococcal Meningtitis, subdural effusion, meningoencephalitis such as uvemeningoencephalitic syndrome, myelitis such as transverse myelitis, neurosyphilis such as tabes dorsalis, poliomyelitis which includes bulbar poliomyelitis and postpoliomyelitis syndrome, prion diseases (such as Creutzfeldt-Jakob Syndrome, Bovine Spongiform Encephalopathy, Gerstmann-Straussler Syndrome, Kuru, Scrapie), and cerebral toxoplasmosis.

[0807] Additional neurologic diseases which can be treated or detected with fusion proteins of the invention and/or polynucleotides encoding albumin fusion proteins of the invention include central nervous system neoplasms such as brain neoplasms that include cerebellar neoplasms such as infratentorial neoplasms, cerebral ventricle neoplasms such as choroid plexus neoplasms, hypothalamic neoplasms and supratentorial neoplasms, meningeal neoplasms, spinal cord neoplasms which include epidural neoplasms, demyelinating diseases such as Canavan Diseases, diffuse cerebral sceloris which includes adrenoleukodystrophy, encephalitis periaxialis, globoid cell leukodystrophy, diffuse cerebral sclerosis such as metachromatic leukodystrophy, allergic encephalomyelitis, necrotizing hemorrhagic encephalomyelitis, progressive multifocal leukoencephalopathy, multiple sclerosis, central pontine myelinolysis, transverse myelitis, neuromyelitis optica, Scrapie, Swayback, Chronic Fatigue Syndrome, Visna, High Pressure Nervous Syndrome, Meningism, spinal cord diseases such as amyotonia congenita, amyotrophic lateral sclerosis, spinal muscular atrophy such as Werdnig-Hoffmann Disease, spinal cord compression, spinal cord neoplasms such as epidural neoplasms, syringomyelia, Tabes Dorsalis, Stiff-Man Syndrome, mental retardation such as Angelman Syndrome, Cri-du-Chat Syndrome, De Lange's Syndrome, Down Syndrome, Gangliosidoses such as gangliosidoses G(M1), Sandhoff Disease, Tay-Sachs Disease, Hartnup Disease, homocystinuria, Laurence-Moon-Biedl Syndrome, Lesch-Nyhan Syndrome, Maple Syrup Urine Disease, mucolipidosis such as fucosidosis, neuronal ceroid-lipofuscinosis, oculocerebrorenal syndrome, phenylketonuria such as maternal phenylketonuria, Prader-Willi Syndrome, Rett Syndrome, Rubinstein-Taybi Syndrome, Tuberous Sclerosis, WAGR Syndrome, nervous system abnormalities such as holoprosencephaly, neural tube defects such as anencephaly which includes hydrangencephaly, Arnold-Chairi Deformity, encephalocele, meningocele, meningomyelocele, spinal dysraphism such as spina bifida cystica and spina bifida occulta.

[0808] Additional neurologic diseases which can be treated or detected with fusion proteins of the invention and/or polynucleotides encoding albumin fusion proteins of the invention include hereditary motor and sensory neuropathies which include Charcot-Marie Disease, Hereditary optic atrophy, Refsum's Disease, hereditary spastic paraplegia, Werdnig-Hoffiann Disease, Hereditary Sensory and Autonomic Neuropathies such as Congenital Analgesia and Familial Dysautonomia, Neurologic manifestations (such as agnosia that include Gerstmann's Syndrome, Amnesia such as retrograde amnesia, apraxia, neurogenic bladder, cataplexy, communicative disorders such as hearing disorders that includes deafness, partial hearing loss, loudness recruitment and tinnitus, language disorders such as aphasia which include agraphia, anomia, broca aphasia, and Wernicke Aphasia, Dyslexia such as Acquired Dyslexia, language development disorders, speech disorders such as aphasia which includes anomia, broca aphasia and Wernicke Aphasia, articulation disorders, communicative disorders such as speech disorders which include dysarthria, echolalia, mutism and stuttering, voice disorders such as aphonia and hoarseness, decerebrate state, delirium, fasciculation, hallucinations, meningism, movement disorders such as angelman syndrome, ataxia, athetosis, chorea, dystonia, hypokinesia, muscle hypotonia, myoclonus, tic, torticollis and tremor, muscle hypertonia such as muscle rigidity such as stiff-man syndrome, muscle spasticity, paralysis such as facial paralysis which includes Herpes Zoster Oticus, Gastroparesis, Hemiplegia, ophthalmoplegia such as diplopia, Duane's Syndrome, Horner's Syndrome, Chronic progressive external ophthalmoplegia such as Kearns Syndrome, Bulbar Paralysis, Tropical Spastic Paraparesis, Paraplegia such as Brown-Sequard Syndrome, quadriplegia, respiratory paralysis and vocal cord paralysis, paresis, phantom limb, taste disorders such as ageusia and dysgeusia, vision disorders such as amblyopia, blindness, color vision defects, diplopia, hemianopsia, scotoma and subnormal vision, sleep disorders such as hypersomnia which includes Kleine-Levin Syndrome, insomnia, and somnambulism, spasm such as trismus, unconsciousness such as coma, persistent vegetative state and syncope and vertigo, neuromuscular diseases such as amyotonia congenita, amyotrophic lateral sclerosis, Lambert-Eaton Myasthenic Syndrome, motor neuron disease, muscular atrophy such as spinal muscular atrophy, Charcot-Marie Disease and Werdnig-Hoffmann Disease, Postpoliomyelitis Syndrome, Muscular Dystrophy, Myasthenia Gravis, Myotonia Atrophica, Myotonia Confenita, Nemaline Myopathy, Familial Periodic Paralysis, Multiplex Paramyloclonus, Tropical Spastic Paraparesis and Stiff-Man Syndrome, peripheral nervous system diseases such as acrodynia, amyloid neuropathies, autonomic nervous system diseases such as Adie's Syndrome, Barre-Lieou Syndrome, Familial Dysautonomia, Horner's Syndrome, Reflex Sympathetic Dystrophy and Shy-Drager Syndrome, Cranial Nerve Diseases such as Acoustic Nerve Diseases such as Acoustic Neuroma which includes Neurofibromatosis 2, Facial Nerve Diseases such as Facial Neuralgia, Melkersson-Rosenthal Syndrome, ocular motility disorders which includes amblyopia, nystagmus, oculomotor nerve paralysis, ophthalmoplegia such as Duane's Syndrome, Horner's Syndrome, Chronic Progressive External Ophthalmoplegia which includes Kearns Syndrome, Strabismus such as Esotropia and Exotropia, Oculomotor Nerve Paralysis, Optic Nerve Diseases such as Optic Atrophy which includes Hereditary Optic Atrophy, Optic Disk Drusen, Optic Neuritis such as Neuromyelitis Optica, Papilledema, Trigeminal Neuralgia, Vocal Cord Paralysis, Demyelinating Diseases such as Neuromyelitis Optica and Swayback, and Diabetic neuropathies such as diabetic foot.

[0809] Additional neurologic diseases which can be treated or detected with fusion proteins of the invention and/or polynucleotides encoding albumin fusion proteins of the invention include nerve compression syndromes such as carpal tunnel syndrome, tarsal tunnel syndrome, thoracic outlet syndrome such as cervical rib syndrome, ulnar nerve compression syndrome, neuralgia such as causalgia, cervico-brachial neuralgia, facial neuralgia and trigeminal neuralgia, neuritis such as experimental allergic neuritis, optic neuritis, polyneuritis, polyradiculoneuritis and radiculities such as polyradiculitis, hereditary motor and sensory neuropathies such as Charcot-Marie Disease, Hereditary Optic Atrophy, Refsum's Disease, Hereditary Spastic Paraplegia and Werdnig-Hoffmann Disease, Hereditary Sensory and Autonomic Neuropathies which include Congenital Analgesia and Familial Dysautonomia, POEMS Syndrome, Sciatica, Gustatory Sweating and Tetany).

[0810] Endocrine Disorders

[0811] Albumin fusion proteins of the invention and/or polynucleotides encoding albumin fusion proteins of the invention, may be used to treat, prevent, diagnose, and/or prognose disorders and/or diseases related to hormone imbalance, and/or disorders or diseases of the endocrine system.

[0812] Hormones secreted by the glands of the endocrine system control physical growth, sexual function, metabolism, and other functions. Disorders may be classified in two ways: disturbances in the production of hormones, and the inability of tissues to respond to hormones. The etiology of these hormone imbalance or endocrine system diseases, disorders or conditions may be genetic, somatic, such as cancer and some autoimmune diseases, acquired (e.g., by chemotherapy, injury or toxins), or infectious. Moreover, fusion proteins of the invention and/or polynucleotides encoding albumin fusion proteins of the invention can be used as a marker or detector of a particular disease or disorder related to the endocrine system and/or hormone imbalance.

[0813] Endocrine system and/or hormone imbalance and/or diseases encompass disorders of uterine motility including, but not limited to: complications with pregnancy and labor (e.g., pre-term labor, post-term pregnancy, spontaneous abortion, and slow or stopped labor); and disorders and/or diseases of the menstrual cycle (e.g., dysmenorrhea and endometriosis).

[0814] Endocrine system and/or hormone imbalance disorders and/or diseases include disorders and/or diseases of the pancreas, such as, for example, diabetes mellitus, diabetes insipidus, congenital pancreatic agenesis, pheochromocytoma—islet cell tumor syndrome; disorders and/or diseases of the adrenal glands such as, for example, Addison's Disease, corticosteroid deficiency, virilizing disease, hirsutism, Cushing's Syndrome, hyperaldosteronism, pheochromocytoma; disorders and/or diseases of the pituitary gland, such as, for example, hyperpituitarism, hypopituitarism, pituitary dwarfism, pituitary adenoma, panhypopituitarism, acromegaly, gigantism; disorders and/or diseases of the thyroid, including but not limited to, hyperthyroidism, hypothyroidism, Plummer's disease, Graves' disease (toxic diffuse goiter), toxic nodular goiter, thyroiditis (Hashimoto's thyroiditis, subacute granulomatous thyroiditis, and silent lymphocytic thyroiditis), Pendred's syndrome, myxedema, cretinism, thyrotoxicosis, thyroid hormone coupling defect, thymic aplasia, Hurthle cell tumours of the thyroid, thyroid cancer, thyroid carcinoma, Medullary thyroid carcinoma; disorders and/or diseases of the parathyroid, such as, for example, hyperparathyroidism, hypoparathyroidism; disorders and/or diseases of the hypothalamus.

[0815] In addition, endocrine system and/or hormone imbalance disorders and/or diseases may also include disorders and/or diseases of the testes or ovaries, including cancer. Other disorders and/or diseases of the testes or ovaries further include, for example, ovarian cancer, polycystic ovary syndrome, Klinefelter's syndrome, vanishing testes syndrome (bilateral anorchia), congenital absence of Leydig's cells, cryptorchidism, Noonan's syndrome, myotonic dystrophy, capillary haemangioma of the testis (benign), neoplasias of the testis and neo-testis.

[0816] Moreover, endocrine system and/or hormone imbalance disorders and/or diseases may also include disorders and/or diseases such as, for example, polyglandular deficiency syndromes, pheochromocytoma, neuroblastoma, multiple Endocrine neoplasia, and disorders and/or cancers of endocrine tissues.

[0817] In another embodiment, albumin fusion proteins of the invention and/or polynucleotides encoding albumin fusion proteins of the invention, may be used to diagnose; prognose, prevent, and/or treat endocrine diseases and/or disorders associated with the tissue(s) in which the Therapeutic protein corresponding to the Therapeutic protein portion of the albumin protein of the invention is expressed,

[0818] Reproductive System Disorders

[0819] The albumin fusion proteins of the invention and/or polynucleotides encoding albumin fusion proteins of the invention may be used for the diagnosis, treatment, or prevention of diseases and/or disorders of the reproductive system. Reproductive system disorders that can be treated by the compositions of the invention, include, but are not limited to, reproductive system injuries, infections, neoplastic disorders, congenital defects, and diseases or disorders which result in infertility, complications with pregnancy, labor, or parturition, and postpartum difficulties.

[0820] Reproductive system disorders and/or diseases include diseases and/or disorders of the testes, including testicular atrophy, testicular feminization, cryptorchism (unilateral and bilateral), anorchia, ectopic testis, epididymitis and orchitis (typically resulting from infections such as, for example, gonorrhea, mumps, tuberculosis, and syphilis), testicular torsion, vasitis nodosa, germ cell tumors (e.g., seminomas, embryonal cell carcinomas, teratocarcinomas, choriocarcinomas, yolk sac tumors, and teratomas), stromal tumors (e.g., Leydig cell tumors), hydrocele, hematocele, varicocele, spermatocele, inguinal hernia, and disorders of sperm production (e.g., immotile cilia syndrome, aspermia, asthenozoospermia, azoospermia, oligospermia, and teratozoospermia).

[0821] Reproductive system disorders also include disorders of the prostate gland, such as acute non-bacterial prostatitis, chronic non-bacterial prostatitis, acute bacterial prostatitis, chronic bacterial prostatitis, prostatodystonia, prostatosis, granulomatous prostatitis, malacoplakia, benign prostatic hypertrophy or hyperplasia, and prostate neoplastic disorders, including adenocarcinomas, transitional cell carcinomas, ductal carcinomas, and squamous cell carcinomas.

[0822] Additionally, the compositions of the invention may be useful in the diagnosis, treatment, and/or prevention of disorders or diseases of the penis and urethra, including inflammatory disorders, such as balanoposthitis, balanitis xerotica obliterans, phimosis, paraphimosis, syphilis, herpes simplex virus, gonorrhea, non-gonococcal urethritis, chlamydia, mycoplasma, trichomonas, HIV, AIDS, Reiter's syndrome, condyloma acuminatum, condyloma latum, and pearly penile papules; urethral abnormalities, such as hypospadias, epispadias, and phimosis; premalignant lesions, including Erythroplasia of Queyrat, Bowen's disease, Bowenoid paplosis, giant condyloma of Buscke-Lowenstein, and varrucous carcinoma; penile cancers, including squamous cell carcinomas, carcinoma in situ, verrucous carcinoma, and disseminated penile carcinoma; urethral neoplastic disorders, including penile urethral carcinoma, bulbomembranous urethral carcinoma, and prostatic urethral carcinoma; and erectile disorders, such as priapism, Peyronie's disease, erectile dysfunction, and impotence.

[0823] Moreover, diseases and/or disorders of the vas deferens include vasculititis and CBAVD (congenital bilateral absence of the vas deferens); additionally, the albumin fusion proteins of the invention and/or polynucleotides encoding albumin fusion proteins of the invention may be used in the diagnosis, treatment, and/or prevention of diseases and/or disorders of the seminal vesicles, including hydatid disease, congenital chloride diarrhea, and polycystic kidney disease.

[0824] Other disorders and/or diseases of the male reproductive system include, for example, Klinefelter's syndrome, Young's syndrome, premature ejaculation, diabetes mellitus, cystic fibrosis, Kartagener's syndrome, high fever, multiple sclerosis, and gynecomastia.

[0825] Further, the polynucleotides, fusion proteins of the invention and/or polynucleotides encoding albumin fusion proteins of the invention may be used in the diagnosis, treatment, and/or prevention of diseases and/or disorders of the vagina and vulva, including bacterial vaginosis, candida vaginitis, herpes simplex virus, chancroid, granuloma inguinale, lymphogranuloma venereum, scabies, human papillomavirus, vaginal trauma, vulvar trauma, adenosis, chlamydia vaginitis, gonorrhea, trichomonas vaginitis, condyloma acuminatum, syphilis, molluscum contagiosum, atrophic vaginitis, Paget's disease, lichen sclerosus, lichen planus, vulvodynia, toxic shock syndrome, vaginismus, vulvovaginitis, vulvar vestibulitis, and neoplastic disorders, such as squamous cell hyperplasia, clear cell carcinoma, basal cell carcinoma, melanomas, cancer of Bartholin's gland, and vulvar intraepithelial neoplasia.

[0826] Disorders and/or diseases of the uterus include dysmenorrhea, retroverted uterus, endometriosis, fibroids, adenomyosis, anovulatory bleeding, amenorrhea, Cushing's syndrome, hydatidiform moles, Asherman's syndrome, premature menopause, precocious puberty, uterine polyps, dysfunctional uterine bleeding (e.g., due to aberrant hormonal signals), and neoplastic disorders, such as adenocarcinomas, keiomyosarcomas, and sarcomas. Additionally, the albumin fusion proteins of the invention and/or polynucleotides encoding albumin fusion proteins of the invention may be useful as a marker or detector of, as well as in the diagnosis, treatment, and/or prevention of congenital uterine abnormalities, such as bicornuate uterus, septate uterus, simple unicornuate uterus, unicornuate uterus with a noncavitary rudimentary horn, unicornuate uterus with a non-communicating cavitary rudimentary horn, unicornuate uterus with a communicating cavitary horn, arcuate uterus, uterine didelfus, and T-shaped uterus.

[0827] Ovarian diseases and/or disorders include anovulation, polycystic ovary syndrome (Stein-Leventhal syndrome), ovarian cysts, ovarian hypofunction, ovarian insensitivity to gonadotropins, ovarian overproduction of androgens, right ovarian vein syndrome, amenorrhea, hirutism, and ovarian cancer (including, but not limited to, primary and secondary cancerous growth, Sertoli-Leydig tumors, endometriod carcinoma of the ovary, ovarian papillary serous adenocarcinoma, ovarian mucinous adenocarcinoma, and Ovarian Krukenberg tumors).

[0828] Cervical diseases and/or disorders include cervicitis, chronic cervicitis, mucopurulent cervicitis, cervical dysplasia, cervical polyps, Nabothian cysts, cervical erosion, cervical incompetence, and cervical neoplasms (including, for example, cervical carcinoma, squamous metaplasia, squamous cell carcinoma, adenosquamous cell neoplasia, and columnar cell neoplasia). Additionally, diseases and/or disorders of the reproductive system include disorders and/or diseases of pregnancy, including miscarriage and stillbirth, such as early abortion, late abortion, spontaneous abortion, induced abortion, therapeutic abortion, threatened abortion, missed abortion, incomplete abortion, complete abortion, habitual abortion, missed abortion, and septic abortion; ectopic pregnancy, anemia, Rh incompatibility, vaginal bleeding during pregnancy, gestational diabetes, intrauterine growth retardation, polyhydramnios, HELLP syndrome, abruptio placentae, placenta previa, hyperemesis, preeclampsia, eclampsia, herpes gestationis, and urticaria of pregnancy. Additionally, the albumin fusion proteins of the invention and/or polynucleotides encoding albumin fusion proteins of the invention may be used in the diagnosis, treatment, and/or prevention of diseases that can complicate pregnancy, including heart disease, heart failure, rheumatic heart disease, congenital heart disease, mitral valve prolapse, high blood pressure, anemia, kidney disease, infectious disease (e.g., rubella, cytomegalovirus, toxoplasmosis, infectious hepatitis, chlamydia, HIV, AIDS, and genital herpes), diabetes mellitus, Graves' disease, thyroiditis, hypothyroidism, Hashimoto's thyroiditis, chronic active hepatitis, cirrhosis of the liver, primary biliary cirrhosis, asthma, systemic lupus eryematosis, rheumatoid arthritis, myasthenia gravis, idiopathic thrombocytopenic purpura, appendicitis, ovarian cysts, gallbladder disorders, and obstruction of the intestine.

[0829] Complications associated with labor and parturition include premature rupture of the membranes, pre-term labor, post-term pregnancy, postmaturity, labor that progresses too slowly, fetal distress (e.g., abnormal heart rate (fetal or maternal), breathing problems, and abnormal fetal position), shoulder dystocia, prolapsed umbilical cord, amniotic fluid embolism, and aberrant uterine bleeding.

[0830] Further, diseases and/or disorders of the postdelivery period, including endometritis, myometritis, parametritis, peritonitis, pelvic thrombophlebitis, pulmonary embolism, endotoxemia, pyelonephritis, saphenous thrombophlebitis, mastitis, cystitis, postpartum hemorrhage, and inverted uterus.

[0831] Other disorders and/or diseases of the female reproductive system that may be diagnosed, treated, and/or prevented by the albumin fusion proteins of the invention and/or polynucleotides encoding albumin fusion proteins of the invention include, for example, Turner's syndrome, pseudohermaphroditism, premenstrual syndrome, pelvic inflammatory disease, pelvic congestion (vascular engorgement), frigidity, anorgasmia, dyspareunia, ruptured fallopian tube, and Mittelschmerz.

[0832] Infectious Disease

[0833] Albumin fusion proteins of the invention and/or polynucleotides encoding albumin fusion proteins of the invention can be used to treat or detect infectious agents. For example, by increasing the immune response, particularly increasing the proliferation and differentiation of B and/or T cells, infectious diseases may be treated. The immune response may be increased by either enhancing an existing immune response, or by initiating a new immune response. Alternatively, fusion proteins of the invention and/or polynucleotides encoding albumin fusion proteins of the invention may also directly inhibit the infectious agent, without necessarily eliciting an immune response.

[0834] Viruses are one example of an infectious agent that can cause disease or symptoms that can be treated or detected by albumin fusion proteins of the invention and/or polynucleotides encoding albumin fusion proteins of the invention. Examples of viruses, include, but are not limited to Examples of viruses, include, but are not limited to the following DNA and RNA viruses and viral families: Arbovirus, Adenoviridae, Arenaviridae, Arterivirus, Birnaviridae, Bunyaviridae, Caliciviridae, Circoviridae, Coronaviridae, Dengue, EBV, HIV, Flaviviridae, Hepadnaviridae (Hepatitis), Herpesviridae (such as, Cytomegalovirus, Herpes Simplex, Herpes Zoster), Mononegavirus (e.g., Paramyxoviridae, Morbillivirus, Rhabdoviridae), Orthomyxoviridae (e.g., Influenza A, Influenza B, and parainfluenza), Papiloma virus, Papovaviridae, Parvoviridae, Picomaviridae, Poxyiridae (such as Smallpox or Vaccinia), Reoviridae (e.g., Rotavirus), Retroviridae (HTLV-I, HTLV-II, Lentivirus), and Togaviridae (e.g., Rubivirus). Viruses falling within these families can cause a variety of diseases or symptoms, including, but not limited to: arthritis, bronchiollitis, respiratory syncytial virus, encephalitis, eye infections (e.g., conjunctivitis, keratitis), chronic fatigue syndrome, hepatitis (A, B, C, E, Chronic Active, Delta), Japanese B encephalitis, Junin, Chikungunya, Rift Valley fever, yellow fever, meningitis, opportunistic infections (e.g., AIDS), pneumonia, Burkitt's Lymphoma, chickenpox, hemorrhagic fever, Measles, Mumps, Parainfluenza, Rabies, the common cold, Polio, leukemia, Rubella, sexually transmitted diseases, skin diseases (e.g., Kaposi's, warts), and viremia. Albumin fusion proteins of the invention and/or polynucleotides encoding albumin fusion proteins of the invention, can be used to treat or detect any of these symptoms or diseases. In specific embodiments, fusion proteins of the invention and/or polynucleotides encoding albumin fusion proteins of the invention are used to treat: meningitis, Dengue, EBV, and/or hepatitis (e.g., hepatitis B). In an additional specific embodiment fusion proteins of the invention and/or polynucleotides encoding albumin fusion proteins of the invention are used to treat patients nonresponsive to one or more other commercially available hepatitis vaccines. In a further specific embodiment fusion proteins of the invention and/or polynucleotides encoding albumin fusion proteins of the invention are used to treat AIDS.

[0835] Similarly, bacterial and fungal agents that can cause disease or symptoms and that can be treated or detected by albumin fusion proteins of the invention and/or polynucleotides encoding albumin fusion proteins of the invention include, but not limited to, the following Gram-Negative and Gram-positive bacteria, bacterial families, and fungi: Actinomyces (e.g., Norcardia), Acinetobacter, Cryptococcus neoformans, Aspergillus, Bacillaceae (e.g., Bacillus anthrasis), Bacteroides (e.g., Bacteroides fragilis), Blastomycosis, Bordetella, Borrelia (e.g., Borrelia burgdorferi), Brucella, Candidia, Campylobacter, Chlamydia, Clostridium (e.g., Clostridium botulinum, Clostridium dificile, Clostridium perfringens, Clostridium tetani), Coccidioides, Corynebacterium (e.g., Corynebacterium diptheriae), Cryptococcus, Dermatocycoses, E. coli (e.g., Enterotoxigenic E. coli and Enterohemorrhagic E. coli), Enterobacter (e.g. Enterobacter aerogenes), Enterobacteriaceae (Klebsiella, Salmonella (e.g., Salmonella typhi, Salmonella enteritidis, Salmonella typhi), Serratia, Yersinia, Shigella), Erysipelothrix, Haemophilus (e.g., Haemophilus influenza type B), Helicobacter, Legionella (e.g., Legionella pneumophila), Leptospira, Listeria (e.g., Listeria monocytogenes), Mycoplasma, Mycobacterium (e.g., Mycobacterium leprae and Mycobacterium tuberculosis), Vibrio (e.g., Vibrio cholerae), Neisseriaceae (e.g., Neisseria gonorrhea, Neisseria meningitidis), Pasteurellacea, Proteus, Pseudomonas (e.g., Pseudomonas aeruginosa), Rickettsiaceae, Spirochetes (e.g., Treponema spp., Leptospira spp., Borrelia spp.), Shigella spp., Staphylococcus (e.g., Staphylococcus aureus), Meningiococcus, Pneumococcus and Streptococcus (e.g., Streptococcus pneumoniae and Groups A, B, and C Streptococci), and Ureaplasmas. These bacterial, parasitic, and fungal families can cause diseases or symptoms, including, but not limited to: antibiotic-resistant infections, bacteremia, endocarditis, septicemia, eye infections (e.g., conjunctivitis), uveitis, tuberculosis, gingivitis, bacterial diarrhea, opportunistic infections (e.g., AIDS related infections), paronychia, prosthesis-related infections, dental caries, Reiter's Disease, respiratory tract infections, such as Whooping Cough or Empyema, sepsis, Lyme Disease, Cat-Scratch Disease, dysentery, paratyphoid fever, food poisoning, Legionella disease, chronic and acute inflammation, erythema, yeast infections, typhoid, pneumonia, gonorrhea, meningitis (e.g., mengitis types A and B), chlamydia, syphillis, diphtheria, leprosy, brucellosis, peptic ulcers, anthrax, spontaneous abortions, birth defects, pneumonia, lung infections, ear infections, deafness, blindness, lethargy, malaise, vomiting, chronic diarrhea, Crohn's disease, colitis, vaginosis, sterility, pelvic inflammatory diseases, candidiasis, paratuberculosis, tuberculosis, lupus, botulism, gangrene, tetanus, impetigo, Rheumatic Fever, Scarlet Fever, sexually transmitted diseases, skin diseases (e.g., cellulitis, dermatocycoses), toxemia, urinary tract infections, wound infections, noscomial infections. Albumin fusion proteins of the invention and/or polynucleotides encoding albumin fusion proteins of the invention, can be used to treat or detect any of these symptoms or diseases. In specific embodiments, fusion proteins of the invention and/or polynucleotides encoding albumin fusion proteins of the invention are used to treat: tetanus, diptheria, botulism, and/or meningitis type B.

[0836] Moreover, parasitic agents causing disease or symptoms that can be treated, prevented, and/or diagnosed by fusion proteins of the invention and/or polynucleotides encoding albumin fusion proteins of the invention include, but not limited to, the following families or class: Amebiasis, Babesiosis, Coccidiosis, Cryptosporidiosis, Dientamoebiasis, Dourine, Ectoparasitic, Giardias, Helminthiasis, Leishmaniasis, Schistisoma, Theileriasis, Toxoplasmosis, Trypanosomiasis, and Trichomonas and Sporozoans (e.g., Plasmodium virax, Plasmodium falciparium, Plasmodium malariae and Plasmodium ovale). These parasites can cause a variety of diseases or symptoms, including, but not limited to: Scabies, Trombiculiasis, eye infections, intestinal disease (e.g., dysentery, giardiasis), liver disease, lung disease, opportunistic infections (e.g., AIDS related), malaria, pregnancy complications, and toxoplasmosis. Albumin fusion proteins of the invention and/or polynucleotides encoding albumin fusion proteins of the invention, can be used to treat, prevent, and/or diagnose any of these symptoms or diseases. In specific embodiments, fusion proteins of the invention and/or polynucleotides encoding albumin fusion proteins of the invention are used to treat, prevent, and/or diagnose malaria.

[0837] Albumin fusion proteins of the invention and/or polynucleotides encoding albumin fusion proteins of the invention could either be by administering an effective amount of an albumin fusion protein of the invnetion to the patient, or by removing cells from the patient, supplying the cells with a polynucleotide of the present invention, and returning the engineered cells to the patient (ex vivo therapy). Moreover, the albumin fusion proteins of the invention and/or polynucleotides encoding albumin fusion proteins of the invention can be used as an antigen in a vaccine to raise an immune response against infectious disease.

[0838] Regeneration

[0839] Albumin fusion proteins of the invention and/or polynucleotides encoding albumin fusion proteins of the invention can be used to differentiate, proliferate, and attract cells, leading to the regeneration of tissues. (See, Science 276:59-87 (1997)). The regeneration of tissues could be used to repair, replace, or protect tissue damaged by congenital defects, trauma (wounds, burns, incisions, or ulcers), age, disease (e.g. osteoporosis, osteocarthritis, periodontal disease, liver failure), surgery, including cosmetic plastic surgery, fibrosis, reperfusion injury, or systemic cytokine damage.

[0840] Tissues that could be regenerated using the present invention include organs (e.g., pancreas, liver, intestine, kidney, skin, endothelium), muscle (smooth, skeletal or cardiac), vasculature (including vascular and lymphatics), nervous, hematopoietic, and skeletal (bone, cartilage, tendon, and ligament) tissue. Preferably, regeneration occurs without or decreased scarring. Regeneration also may include angiogenesis.

[0841] Moreover, fusion proteins of the invention and/or polynucleotides encoding albumin fusion proteins of the invention, may increase regeneration of tissues difficult to heal. For example, increased tendon/ligament regeneration would quicken recovery time after damage. Albumin fusion proteins of the invention and/or polynucleotides encoding albumin fusion proteins of the invention could also be used prophylactically in an effort to avoid damage. Specific diseases that could be treated include of tendinitis, carpal tunnel syndrome, and other tendon or ligament defects. A further example of tissue regeneration of non-healing wounds includes pressure ulcers, ulcers associated with vascular insufficiency, surgical, and traumatic wounds.

[0842] Similarly, nerve and brain tissue could also be regenerated by using fusion proteins of the invention and/or polynucleotides encoding albumin fusion proteins of the invention, to proliferate and differentiate nerve cells. Diseases that could be treated using this method include central and peripheral nervous system diseases, neuropathies, or mechanical and traumatic disorders (e.g., spinal cord disorders, head trauma, cerebrovascular disease, and stoke). Specifically, diseases associated with peripheral nerve injuries, peripheral neuropathy (e.g., resulting from chemotherapy or other medical therapies), localized neuropathies, and central nervous system diseases (e.g., Alzheimer's disease, Parkinson's disease, Huntington's disease, amyotrophic lateral sclerosis, and Shy-Drager syndrome), could all be treated using the albumin fusion proteins of the invention and/or polynucleotides encoding albumin fusion proteins of the invention.

[0843] Gastrointestinal Disorders

[0844] Albumin fusion proteins of the invention and/or polynucleotides encoding albumin fusion proteins of the invention, may be used to treat, prevent, diagnose, and/or prognose gastrointestinal disorders, including inflammatory diseases and/or conditions, infections, cancers (e.g., intestinal neoplasms (carcinoid tumor of the small intestine, non-Hodgkin's lymphoma of the small intestine, small bowl lymphoma)), and ulcers, such as peptic ulcers.

[0845] Gastrointestinal disorders include dysphagia, odynophagia, inflammation of the esophagus, peptic esophagitis, gastric reflux, submucosal fibrosis and stricturing, Mallory-Weiss lesions, leiomyomas, lipomas, epidermal cancers, adeoncarcinomas, gastric retention disorders, gastroenteritis, gastric atrophy, gastric/stomach cancers, polyps of the stomach, autoimmune disorders such as pernicious anemia, pyloric stenosis, gastritis (bacterial, viral, eosinophilic, stress-induced, chronic erosive, atrophic, plasma cell, and Menetrier's), and peritoneal diseases (e.g., chyloperioneum, hemoperitoneum, mesenteric cyst, mesenteric lymphadenitis, mesenteric vascular occlusion, panniculitis, neoplasms, peritonitis, pneumoperitoneum, bubphrenic abscess,).

[0846] Gastrointestinal disorders also include disorders associated with the small intestine, such as malabsorption syndromes, distension, irritable bowel syndrome, sugar intolerance, celiac disease, duodenal ulcers, duodenitis, tropical sprue, Whipple's disease, intestinal lymphangiectasia, Crohn's disease, appendicitis, obstructions of the ileum, Meckel's diverticulum, multiple diverticula, failure of complete rotation of the small and large intestine, lymphoma, and bacterial and parasitic diseases (such as Traveler's diarrhea, typhoid and paratyphoid, cholera, infection by Roundworms (Ascariasis lumbricoides), Hookworms (Ancylostoma duodenale), Threadworms (Enterobius vermicularis), Tapeworms (Taenia saginata, Echinococcus granulosus, Diphyllobothrium spp., and T. solium).

[0847] Liver diseases and/or disorders include intrahepatic cholestasis (alagille syndrome, biliary liver cirrhosis), fatty liver (alcoholic fatty liver, reye syndrome), hepatic vein thrombosis, hepatolentricular degeneration, hepatomegaly, hepatopulmonary syndrome, hepatorenal syndrome, portal hypertension (esophageal and gastric varices), liver abscess (amebic liver abscess), liver cirrhosis (alcoholic, biliary and experimental), alcoholic liver diseases (fatty liver, hepatitis, cirrhosis), parasitic (hepatic echinococcosis, fascioliasis, amebic liver abscess), jaundice (hemolytic, hepatocellular, and cholestatic), cholestasis, portal hypertension, liver enlargement, ascites, hepatitis (alcoholic hepatitis, animal hepatitis, chronic hepatitis (autoimmune, hepatitis B, hepatitis C, hepatitis D, drug induced), toxic hepatitis, viral human hepatitis (hepatitis A, hepatitis B, hepatitis C, hepatitis D, hepatitis E), Wilson's disease, granulomatous hepatitis, secondary biliary cirrhosis, hepatic encephalopathy, portal hypertension, varices, hepatic encephalopathy, primary biliary cirrhosis, primary sclerosing cholangitis, hepatocellular adenoma, hemangiomas, bile stones, liver failure (hepatic encephalopathy, acute liver failure), and liver neoplasms (angiomyolipoma, calcified liver metastases, cystic liver metastases, epithelial tumors, fibrolamellar hepatocarcinoma, focal nodular hyperplasia, hepatic adenoma, hepatobiliary cystadenoma, hepatoblastoma, hepatocellular carcinoma, hepatoma, liver cancer, liver hemangioendothelioma, mesenchymal hamartoma, mesenchymal tumors of liver, nodular regenerative hyperplasia, benign liver tumors (Hepatic cysts [Simple cysts, Polycystic liver disease, Hepatobiliary cystadenoma, Choledochal cyst], Mesenchymal tumors [Mesenchymal hamartoma, Infantile hemangioendothelioma, Hemangioma, Peliosis hepatis, Lipomas, Inflammatory pseudotumor, Miscellaneous], Epithelial tumors [Bile duct epithelium (Bile duct hamartoma, Bile duct adenoma), Hepatocyte (Adenoma, Focal nodular hyperplasia, Nodular regenerative hyperplasia)], malignant liver tumors [hepatocellular, hepatoblastoma, hepatocellular carcinoma, cholangiocellular, cholangiocarcinoma, cystadenocarcinoma, tumors of blood vessels, angiosarcoma, Karposi's sarcoma, hemangioendothelioma, other tumors, embryonal sarcoma, fibrosarcoma, leiomyosarcoma, rhabdomyosarcoma, carcinosarcoma, teratoma, carcinoid, squamous carcinoma, primary lymphoma]), peliosis hepatis, erythrohepatic porphyria, hepatic porphyria (acute intermittent porphyria, porphyria cutanea tarda), Zellweger syndrome).

[0848] Pancreatic diseases and/or disorders include acute pancreatitis, chronic pancreatitis (acute necrotizing pancreatitis, alcoholic pancreatitis), neoplasms (adenocarcinoma of the pancreas, cystadenocarcinoma, insulinoma, gastrinoma, and glucagonoma, cystic neoplasms, islet-cell tumors, pancreoblastoma), and other pancreatic diseases (e.g., cystic fibrosis, cyst (pancreatic pseudocyst, pancreatic fistula, insufficiency)).

[0849] Gallbladder diseases include gallstones (cholelithiasis and choledocholithiasis), postcholecystectomy syndrome, diverticulosis of the gallbladder, acute cholecystitis, chronic cholecystitis, bile duct tumors, and mucocele.

[0850] Diseases and/or disorders of the large intestine include antibiotic-associated colitis, diverticulitis, ulcerative colitis, acquired megacolon, abscesses, fungal and bacterial infections, anorectal disorders (e.g., fissures, hemorrhoids), colonic diseases (colitis, colonic neoplasms [colon cancer, adenomatous colon polyps (e.g., villous adenoma), colon carcinoma, colorectal cancer], colonic diverticulitis, colonic diverticulosis, megacolon [Hirschsprung disease, toxic megacolon]; sigmoid diseases [proctocolitis, sigmoin neoplasms]), constipation, Crohn's disease, diarrhea (infantile diarrhea, dysentery), duodenal diseases (duodenal neoplasms, duodenal obstruction, duodenal ulcer, duodenitis), enteritis (enterocolitis), HIV enteropathy, ileal diseases (ileal neoplasms, ileitis), immunoproliferative small intestinal disease, inflammatory bowel disease (ulcerative colitis, Crohn's disease), intestinal atresia, parasitic diseases (anisakiasis, balantidiasis, blastocystis infections, cryptosporidiosis, dientamoebiasis, amebic dysentery, giardiasis), intestinal fistula (rectal fistula), intestinal neoplasms (cecal neoplasms, colonic neoplasms, duodenal neoplasms, ileal neoplasms, intestinal polyps, jejunal neoplasms, rectal neoplasms), intestinal obstruction (afferent loop syndrome, duodenal obstruction, impacted feces, intestinal pseudo-obstruction [cecal volvulus], intussusception), intestinal perforation, intestinal polyps (colonic polyps, gardner syndrome, peutz-jeghers syndrome), jejunal diseases (jejunal neoplasms), malabsorption syndromes (blind loop syndrome, celiac disease, lactose intolerance, short bowl syndrome, tropical sprue, whipple's disease), mesenteric vascular occlusion, pneumatosis cystoides intestinalis, protein-losing enteropathies (intestinal lymphagiectasis), rectal diseases (anus diseases, fecal incontinence, hemorrhoids, proctitis, rectal fistula, rectal prolapse, rectocele), peptic ulcer (duodenal ulcer, peptic esophagitis, hemorrhage, perforation, stomach ulcer, Zollinger-Ellison syndrome), postgastrectomy syndromes (dumping syndrome), stomach diseases (e.g., achlorhydria, duodenogastric reflux (bile reflux), gastric antral vascular ectasia, gastric fistula, gastric outlet obstruction, gastritis (atrophic or hypertrophic), gastroparesis, stomach dilatation, stomach diverticulum, stomach neoplasms (gastric cancer, gastric polyps, gastric adenocarcinoma, hyperplastic gastric polyp), stomach rupture, stomach ulcer, stomach volvulus), tuberculosis, visceroptosis, vomiting (e.g., hematemesis, hyperemesis gravidarum, postoperative nausea and vomiting) and hemorrhagic colitis.

[0851] Further diseases and/or disorders of the gastrointestinal system include biliary tract diseases, such as, gastroschisis, fistula (e.g., biliary fistula, esophageal fistula, gastric fistula, intestinal fistula, pancreatic fistula), neoplasms (e.g., biliary tract neoplasms, esophageal neoplasms, such as adenocarcinoma of the esophagus, esophageal squamous cell carcinoma, gastrointestinal neoplasms, pancreatic neoplasms, such as adenocarcinoma of the pancreas, mucinous cystic neoplasm of the pancreas, pancreatic cystic neoplasms, pancreatoblastoma, and peritoneal neoplasms), esophageal disease (e.g., bullous diseases, candidiasis, glycogenic acanthosis, ulceration, barrett esophagus varices, atresia, cyst, diverticulum (e.g., Zenker's diverticulum), fistula (e.g., tracheoesophageal fistula), motility disorders (e.g., CREST syndrome, deglutition disorders, achalasia, spasm, gastroesophageal reflux), neoplasms, perforation (e.g., Boerhaave syndrome, Mallory-Weiss syndrome), stenosis, esophagitis, diaphragmatic hernia (e.g., hiatal hernia); gastrointestinal diseases, such as, gastroenteritis (e.g., cholera morbus, norwalk virus infection), hemorrhage (e.g., hematemesis, melena, peptic ulcer hemorrhage), stomach neoplasms (gastric cancer, gastric polyps, gastric adenocarcinoma, stomach cancer)), hernia (e.g., congenital diaphragmatic hernia, femoral hernia, inguinal hernia, obturator hernia, umbilical hernia, ventral hernia), and intestinal diseases (e.g., cecal diseases (appendicitis, cecal neoplasms)).

[0852] Chemotaxis

[0853] Albumin fusion proteins of the invention and/or polynucleotides encoding albumin fusion proteins of the invention may have chemotaxis activity. A chemotaxic molecule attracts or mobilizes cells (e.g., monocytes, fibroblasts, neutrophils, T-cells, mast cells, eosinophils, epithelial and/or endothelial cells) to a particular site in the body, such as inflammation, infection, or site of hyperproliferation. The mobilized cells can then fight off and/or heal the particular trauma or abnormality.

[0854] Albumin fusion proteins of the invention and/or polynucleotides encoding albumin fusion proteins of the invention may increase chemotaxic activity of particular cells. These chemotactic molecules can then be used to treat inflammation, infection, hyperproliferative disorders, or any immune system disorder by increasing the number of cells targeted to a particular location in the body. For example, chemotaxic molecules can be used to treat wounds and other trauma to tissues by attracting immune cells to the injured location. Chemotactic molecules of the present invention can also attract fibroblasts, which can be used to treat wounds.

[0855] It is also contemplated that fusion proteins of the invention and/or polynucleotides encoding albumin fusion proteins of the invention may inhibit chemotactic activity. These molecules could also be used to treat disorders. Thus, fusion proteins of the invention and/or polynucleotides encoding albumin fusion proteins of the invention could be used as an inhibitor of chemotaxis.

[0856] Binding Activity

[0857] Albumin fusion proteins of the invention may be used to screen for molecules that bind to the Therapeutic protein portion of the fusion protein or for molecules to which the Therapeutic protein portion of the fusion protein binds. The binding of the fusion protein and the molecule may activate (agonist), increase, inhibit (antagonist), or decrease activity of the fusion protein or the molecule bound. Examples of such molecules include antibodies, oligonucleotides, proteins (e.g., receptors), or small molecules.

[0858] Preferably, the molecule is closely related to the natural ligand of the Therapeutic protein portion of the fusion protein of the invention, e.g., a fragment of the ligand, or a natural substrate, a ligand, a structural or functional mimetic. (See, Coligan et al., Current Protocols in Imnunology 1(2):Chapter 5 (1991)). Similarly, the molecule can be closely related to the natural receptor to which the Therapeutic protein portion of an albumin fusion protein of the invention binds, or at least, a fragment of the receptor capable of being bound by the Therapeutic protein portion of an albumin fusion protein of the invention (e.g., active site). In either case, the molecule can be rationally designed using known techniques.

[0859] Preferably, the screening for these molecules involves producing appropriate cells which express the albumin fusion proteins of the invention. Preferred cells include cells from mammals, yeast, Drosophila, or E. coli.

[0860] The assay may simply test binding of a candidate compound to an albumin fusion protein of the invention, wherein binding is detected by a label, or in an assay involving competition with a labeled competitor. Further, the assay may test whether the candidate compound results in a signal generated by binding to the fusion protein.

[0861] Alternatively, the assay can be carried out using cell-free preparations, fusion protein/molecule affixed to a solid support, chemical libraries, or natural product mixtures. The assay may also simply comprise the steps of mixing a candidate compound with a solution containing an albumin fusion protein, measuring fusion protein/molecule activity or binding, and comparing the fusion protein/molecule activity or binding to a standard.

[0862] Preferably, an ELISA assay can measure fusion protein level or activity in a sample (e.g., biological sample) using a monoclonal or polyclonal antibody. The antibody can measure fusion protein level or activity by either binding, directly or indirectly, to the albumin fusion protein or by competing with the albumin fusion protein for a substrate.

[0863] Additionally, the receptor to which a Therapeutic protein portion of an albumin fusion protein of the invention binds can be identified by numerous methods known to those of skill in the art, for example, ligand panning and FACS sorting (Coligan, et al., Current Protocols in Immun., 1(2), Chapter 5, (1991)). For example, in cases wherein the Therapeutic protein portion of the fusion protein corresponds to FGF, expression cloning may be employed wherein polyadenylated RNA is prepared from a cell responsive to the albumin fusion protein, for example, NIH3T3 cells which are known to contain multiple receptors for the FGF family proteins, and SC-3 cells, and a cDNA library created from this RNA is divided into pools and used to transfect COS cells or other cells that are not responsive to the albumin fusion protein. Transfected cells which are grown on glass slides are exposed to the albumin fusion protein of the present invention, after they have been labeled. The albumin fusion proteins can be labeled by a variety of means including iodination or inclusion of a recognition site for a site-specific protein kinase.

[0864] Following fixation and incubation, the slides are subjected to auto-radiographic analysis. Positive pools are identified and sub-pools are prepared and re-transfected using an iterative sub-pooling and re-screening process, eventually yielding a single clones that encodes the putative receptor.

[0865] As an alternative approach for receptor identification, a labeled albumin fusion protein can be photoaffinity linked with cell membrane or extract preparations that express the receptor molecule for the Therapeutoc protein component of an albumin fusion protein of the invention, the linked material may be resolved by PAGE analysis and exposed to X-ray film. The labeled complex containing the receptors of the fusion protein can be excised, resolved into peptide fragments, and subjected to protein microsequencing. The amino acid sequence obtained from microsequencing would be used to design a set of degenerate oligonucleotide probes to screen a cDNA library to identify the genes encoding the putative receptors.

[0866] Moreover, the techniques of gene-shuffling, motif-shuffling, exon-shuffling, and/or codon-shuffling (collectively referred to as “DNA shuffling”) may be employed to modulate the activities of the fusion protein, and/or Therapeutic protein portion or albumin component of an albumin fusion protein of the present invention, thereby effectively generating agonists and antagonists of an albumin fusion protein of the present invention. See generally, U.S. Pat. Nos. 5,605,793, 5,811,238, 5,830,721, 5,834,252, and 5,837,458, and Patten, P. A., et al., Curr. Opinion Biotechnol. 8:724-33 (1997); Harayama, S. Trends Biotechnol. 16(2):76-82 (1998); Hansson, L. O., et al., J. Mol. Biol. 287:265-76 (1999); and Lorenzo, M. M. and Blasco, R. Biotechniques 24(2):308-13 (1998); each of these patents and publications are hereby incorporated by reference). In one embodiment, alteration of polynucleotides encoding albumin fusion proteins of the invention and thus, the albumin fusion proteins encoded thereby, may be achieved by DNA shuffling. DNA shuffling involves the assembly of two or more DNA segments into a desired molecule by homologous, or site-specific, recombination. In another embodiment, polynucleotides encoding albumin fusion proteins of the invention and thus, the albumin fusion proteins encoded thereby, may be altered by being subjected to random mutagenesis by error-prone PCR, random nucleotide insertion or other methods prior to recombination. In another embodiment, one or more components, motifs, sections, parts, domains, fragments, etc., of an albumin fusion protein of the present invention may be recombined with one or more components, motifs, sections, parts, domains, fragments, etc. of one or more heterologous molecules. In preferred embodiments, the heterologous molecules are family members. In further preferred embodiments, the heterologous molecule is a growth factor such as, for example, platelet-derived growth factor (PDGF), insulin-like growth factor (IGF-I), transforming growth factor (TGF)-alpha, epidermal growth factor (EGF), fibroblast growth factor (FGF), TGF-beta, bone morphogenetic protein (BMP)-2, BMP-4, BMP-5, BMP-6, BMP-7, activins A and B, decapentaplegic(dpp), 60A, OP-2, dorsalin, growth differentiation factors (GDFs), nodal, MIS, inhibin-alpha, TGF-beta1, TGF-beta2, TGF-beta3, TGF-beta5, and glial-derived neurotrophic factor (GDNF).

[0867] Other preferred fragments are biologically active fragments of the Therapeutic protein portion and/or albumin component of the albumin fusion proteins of the present invention. Biologically active fragments are those exhibiting activity similar, but not necessarily identical, to an activity of a Therapeutic protein portion and/or albumin component of the albumin fusion proteins of the present invention. The biological activity of the fragments may include an improved desired activity, or a decreased undesirable activity.

[0868] Additionally, this invention provides a method of screening compounds to identify those which modulate the action of an albumin fusion protein of the present invention. An example of such an assay comprises combining a mammalian fibroblast cell, an albumin fusion protein of the present invention, and the compound to be screened and ³[H] thymidine under cell culture conditions where the fibroblast cell would normally proliferate. A control assay may be performed in the absence of the compound to be screened and compared to the amount of fibroblast proliferation in the presence of the compound to determine if the compound stimulates proliferation by determining the uptake of ³[H] thymidine in each case. The amount of fibroblast cell proliferation is measured by liquid scintillation chromatography which measures the incorporation of ³[H] thymidine. Both agonist and antagonist compounds may be identified by this procedure.

[0869] In another method, a mammalian cell or membrane preparation expressing a receptor for the Therapeutic protien component of a fusion protine of the invention is incubated with a labeled fusion protein of the present invention in the presence of the compound. The ability of the compound to enhance or block this interaction could then be measured. Alternatively, the response of a known second messenger-system following interaction of a compound to be screened and the receptor is measured and the ability of the compound to bind to the receptor and elicit a second messenger response is measured to determine if the compound is a potential fusion protein. Such second-messenger systems include but are not limited to, cAMP guanylate cyclase, ion channels or phosphoinositide hydrolysis.

[0870] All of these above assays can be used as diagnostic or prognostic markers. The molecules discovered using these assays can be used to treat disease or to bring about a particular result in a patient (e.g., blood vessel growth) by activating or inhibiting the fusion protein/molecule. Moreover, the assays can discover agents which may inhibit or enhance the production of the albumin fusion proteins of the invention from suitably manipulated cells or tissues.

[0871] Therefore, the invention includes a method of identifying compounds which bind to an albumin fusion protein of the invention comprising the steps of: (a) incubating a candidate binding compound with an albumin fusion protein of the present invention; and (b) determining if binding has occurred. Moreover, the invention includes a method of identifying agonists/antagonists comprising the steps of: (a) incubating a candidate compound with an albumin fusion protein of the present invention, (b) assaying a biological activity, and (b) determining if a biological activity of the fusion protein has been altered.

[0872] Targeted Delivery

[0873] In another embodiment, the invention provides a method of delivering compositions to targeted cells expressing a receptor for a component of an albumin fusion protein of the invention.

[0874] As discussed herein, fusion proteins of the invention may be associated with heterologous polypeptides, heterologous nucleic acids, toxins, or prodrugs via hydrophobic, hydrophilic, ionic and/or covalent interactions. In one embodiment, the invention provides a method for the specific delivery of compositions of the invention to cells by administering fusion proteins of the invention (including antibodies) that are associated with heterologous polypeptides or nucleic acids. In one example, the invention provides a method for delivering a Therapeutic protein into the targeted cell. In another example, the invention provides a method for delivering a single stranded nucleic acid (e.g., antisense or ribozymes) or double stranded nucleic acid (e.g., DNA that can integrate into the cell's genome or replicate episomally and that can be transcribed) into the targeted cell.

[0875] In another embodiment, the invention provides a method for the specific destruction of cells (e.g., the destruction of tumor cells) by administering an albumin fusion protein of the invention (e.g., polypeptides of the invention or antibodies of the invention) in association with toxins or cytotoxic prodrugs.

[0876] By “toxin” is meant compounds that bind and activate endogenous cytotoxic effector systems, radioisotopes, holotoxins, modified toxins, catalytic subunits of toxins, or any molecules or enzymes not normally present in or on the surface of a cell that under defined conditions cause the cell's death. Toxins that may be used according to the methods of the invention include, but are not limited to, radioisotopes known in the art, compounds such as, for example, antibodies (or complement fixing containing portions thereof) that bind an inherent or induced endogenous cytotoxic effector system, thymidine kinase, endonuclease, RNAse, alpha toxin, ricin, abrin, Pseudomonas exotoxin A, diphtheria toxin, saporin, momordin, gelonin, pokeweed antiviral protein, alpha-sarcin and cholera toxin. By “cytotoxic prodrug” is meant a non-toxic compound that is converted by an enzyme, normally present in the cell, into a cytotoxic compound. Cytotoxic prodrugs that may be used according to the methods of the invention include, but are not limited to, glutamyl derivatives of benzoic acid mustard alkylating agent, phosphate derivatives of etoposide or mitomycin C, cytosine arabinoside, daunorubisin, and phenoxyacetamide derivatives of doxorubicin.

[0877] Drug Screening

[0878] Further contemplated is the use of the albumin fusion proteins of the present invention, or the polynucleotides encoding these fusion proteins, to screen for molecules which modify the activities of the albumin fusion protein of the present invention or proteins corresponding to the Therapeutic protein portion of the albumin fusion protein. Such a method would include contacting the fusion protein with a selected compound(s) suspected of having antagonist or agonist activity, and assaying the activity of the fusion protein following binding.

[0879] This invention is particularly useful for screening therapeutic compounds by using the albumin fusion proteins of the present invention, or binding fragments thereof, in any of a variety of drug screening techniques. The albumin fusion protein employed in such a test may be affixed to a solid support, expressed on a cell surface, free in solution, or located intracellularly. One method of drug screening utilizes eukaryotic or prokaryotic host cells which are stably transformed with recombinant nucleic acids expressing the albumin fusion protein. Drugs are screened against such transformed cells or supernatants obtained from culturing such cells, in competitive binding assays. One may measure, for example, the formulation of complexes between the agent being tested and an albumin fusion protein of the present invention.

[0880] Thus, the present invention provides methods of screening for drugs or any other agents which affect activities mediated by the albumin fusion proteins of the present invention. These methods comprise contacting such an agent with an albumin fusion protein of the present invention or a fragment thereof and assaying for the presence of a complex between the agent and the albumin fusion protein or a fragment thereof, by methods well known in the art. In such a competitive binding assay, the agents to screen are typically labeled. Following incubation, free agent is separated from that present in bound form, and the amount of free or uncomplexed label is a measure of the ability of a particular agent to bind to the albumin fusion protein of the present invention.

[0881] Another technique for drug screening provides high throughput screening for compounds having suitable binding affinity to an albumin fusion protein of the present invention, and is described in great detail in European Patent Application 84/03564, published on Sep. 13, 1984, which is incorporated herein by reference herein. Briefly stated, large numbers of different small peptide test compounds are synthesized on a solid substrate, such as plastic pins or some other surface. The peptide test compounds are reacted with an albumin fusion protein of the present invention and washed. Bound peptides are then detected by methods well known in the art. Purified albumin fusion protein may be coated directly onto plates for use in the aforementioned drug screening techniques. In addition, non-neutralizing antibodies may be used to capture the peptide and immobilize it on the solid support.

[0882] This invention also contemplates the use of competitive drug screening assays in which neutralizing antibodies capable of binding an albumin fusion protein of the present invention specifically compete with a test compound for binding to the albumin fusion protein or fragments thereof. In this manner, the antibodies are used to detect the presence of any peptide which shares one or more antigenic epitopes with an albumin fusion protein of the invention.

[0883] Binding Peptides and Other Molecules

[0884] The invention also encompasses screening methods for identifying polypeptides and nonpolypeptides that bind albumin fusion proteins of the invention, and the binding molecules identified thereby. These binding molecules are useful, for example, as agonists and antagonists of the albumin fusion proteins of the invention. Such agonists and antagonists can be used, in accordance with the invention, in the therapeutic embodiments described in detail, below.

[0885] This method comprises the steps of:

[0886] contacting an albumin fusion protein of the invention with a plurality of molecules; and

[0887] identifying a molecule that binds the albumin fusion protein.

[0888] The step of contacting the albumin fusion protein of the invention with the plurality of molecules may be effected in a number of ways. For example, one may contemplate immobilizing the albumin fusion protein on a solid support and bringing a solution of the plurality of molecules in contact with the immobilized polypeptides. Such a procedure would be akin to an affinity chromatographic process, with the affinity matrix being comprised of the immobilized albumin fusion protein of the invention. The molecules having a selective affinity for the albumin fusion protein can then be purified by affinity selection. The nature of the solid support, process for attachment of the albumin fusion protein to the solid support, solvent, and conditions of the affinity isolation or selection are largely conventional and well known to those of ordinary skill in the art.

[0889] Alternatively, one may also separate a plurality of polypeptides into substantially separate fractions comprising a subset of or individual polypeptides. For instance, one can separate the plurality of polypeptides by gel electrophoresis, column chromatography, or like method known to those of ordinary skill for the separation of polypeptides. The individual polypeptides can also be produced by a transformed host cell in such a way as to be expressed on or about its outer surface (e.g., a recombinant phage). Individual isolates can then be “probed” by an albumin fusion protein of the invention, optionally in the presence of an inducer should one be required for expression, to determine if any selective affinity interaction takes place between the albumin fusion protein and the individual clone. Prior to contacting the albumin fusion protein with each fraction comprising individual polypeptides, the polypeptides could first be transferred to a solid support for additional convenience. Such a solid support may simply be a piece of filter membrane, such as one made of nitrocellulose or nylon. In this manner, positive clones could be identified from a collection of transformed host cells of an expression library, which harbor a DNA construct encoding a polypeptide having a selective affinity for an albumin fusion protein of the invention. Furthermore, the amino acid sequence of the polypeptide having a selective affinity for an albumin fusion protein of the invention can be determined directly by conventional means or the coding sequence of the DNA encoding the polypeptide can frequently be determined more conveniently. The primary sequence can then be deduced from the corresponding DNA sequence. If the amino acid sequence is to be determined from the polypeptide itself, one may use microsequencing techniques. The sequencing technique may include mass spectroscopy.

[0890] In certain situations, it may be desirable to wash away any unbound polypeptides from a mixture of an albumin fusion protein of the invention and the plurality of polypeptides prior to attempting to determine or to detect the presence of a selective affinity interaction. Such a wash step may be particularly desirable when the albumin fusion protein of the invention or the plurality of polypeptides are bound to a solid support.

[0891] The plurality of molecules provided according to this method may be provided by way of diversity libraries, such as random or combinatorial peptide or nonpeptide libraries which can be screened for molecules that specifically bind an albumin fusion protein of the invention. Many libraries are known in the art that can be used, e.g., chemically synthesized libraries, recombinant (e.g., phage display libraries), and in vitro translation-based libraries. Examples of chemically synthesized libraries are described in Fodor et al., Science 251:767-773 (1991); Houghten et al., Nature 354:84-86 (1991); Lam et al., Nature 354:82-84 (1991); Medynski, Bio/Technology 12:709-710 (1994); Gallop et al., J. Medicinal Chemistry 37(9):1233-1251 (1994); Ohlmeyer et al., Proc. Natl. Acad. Sci. USA 90:10922-10926 (1993); Erb et al., Proc. Natl. Acad. Sci. USA 91:11422-11426 (1994); Houghten et al., Biotechniques 13:412 (1992); Jayawickreme et al., Proc. Natl. Acad. Sci. USA 91:1614-1618 (1994); Salmon et al., Proc. Natl. Acad. Sci. USA 90:11708-11712 (1993); PCT Publication No. WO 93/20242; and Brenner and Lerner, Proc. Natl. Acad. Sci. USA 89:5381-5383 (1992).

[0892] Examples of phage display libraries are described in Scott et al., Science 249:386-390 (1990); Devlin et al., Science, 249:404-406 (1990); Christian et al., 1992, J. Mol. Biol. 227:711-718 1992); Lenstra, J. Immunol. Meth. 152:149-157 (1992); Kay et al., Gene 128:59-65 (1993); and PCT Publication No. WO 94/18318 dated Aug. 18, 1994.

[0893] In vitro translation-based libraries include but are not limited to those described in PCT Publication No. WO 91/05058 dated Apr. 18, 1991; and Mattheakis et al., Proc. Natl. Acad. Sci. USA 91:9022-9026 (1994).

[0894] By way of examples of nonpeptide libraries, a benzodiazepine library (see e.g., Bunin et al., Proc. Natl. Acad. Sci. USA 91:4708-4712 (1994)) can be adapted for use. Peptoid libraries (Simon et al., Proc. Natl. Acad. Sci. USA 89:9367-9371 (1992)) can also be used. Another example of a library that can be used, in which the amide functionalities in peptides have been permethylated to generate a chemically transformed combinatorial library, is described by Ostresh et al. (Proc. Natl. Acad. Sci. USA 91:11138-11142 (1994)).

[0895] The variety of non-peptide libraries that are useful in the present invention is great. For example, Ecker and Crooke (Bio/Technology 13:351-360 (1995) list benzodiazepines, hydantoins, piperazinediones, biphenyls, sugar analogs, beta-mercaptoketones, arylacetic acids, acylpiperidines, benzopyrans, cubanes, xanthines, aminimides, and oxazolones as among the chemical species that form the basis of various libraries.

[0896] Non-peptide libraries can be classified broadly into two types: decorated monomers and oligomers. Decorated monomer libraries employ a relatively simple scaffold structure upon which a variety functional groups is added. Often the scaffold will be a molecule with a known useful pharmacological activity. For example, the scaffold might be the benzodiazepine structure.

[0897] Non-peptide oligomer libraries utilize a large number of monomers that are assembled together in ways that create new shapes that depend on the order of the monomers. Among the monomer units that have been used are carbamates, pyrrolinones, and morpholinos. Peptoids, peptide-like oligomers in which the side chain is attached to the alpha amino group rather than the alpha carbon, form the basis of another version of non-peptide oligomer libraries. The first non-peptide oligomer libraries utilized a single type of monomer and thus contained a repeating backbone. Recent libraries have utilized more than one monomer, giving the libraries added flexibility.

[0898] Screening the libraries can be accomplished by any of a variety of commonly known methods. See, e.g., the following references, which disclose screening of peptide libraries: Parmley et al., Adv. Exp. Med. Biol. 251:215-218 (1989); Scott et al, Science 249:386-390 (1990); Fowlkes et al., BioTechniques 13:422-427 (1992); Oldenburg et al., Proc. Natl. Acad. Sci. USA 89:5393-5397 (1992); Yu et al., Cell 76:933-945 (1994); Staudt et al., Science 241:577-580 (1988); Bock et al., Nature 355:564-566 (1992); Tuerk et al., Proc. Natl. Acad. Sci. USA 89:6988-6992 (1992); Ellington et al., Nature 355:850-852 (1992); U.S. Pat. No. 5,096,815, U.S. Pat. No. 5,223,409, and U.S. Pat. No. 5,198,346, all to Ladner et al.; Rebar et al., Science 263:671-673 (1993); and PCT Publication No. WO 94/18318.

[0899] In a specific embodiment, screening to identify a molecule that binds an albumin fusion protein of the invention can be carried out by contacting the library members with an albumin fusion protein of the invention immobilized on a solid phase and harvesting those library members that bind to the albumin fusion protein. Examples of such screening methods, termed “panning” techniques are described by way of example in Parmley et al., Gene 73:305-318 (1988); Fowlkes et al., BioTechniques 13:422-427 (1992); PCT Publication No. WO 94/18318; and in references cited herein.

[0900] In another embodiment, the two-hybrid system for selecting interacting proteins in yeast (Fields et al., Nature 340:245-246 (1989); Chien et al., Proc. Natl. Acad. Sci. USA 88:9578-9582 (1991) can be used to identify molecules that specifically bind to polypeptides of the invention.

[0901] Where the binding molecule is a polypeptide, the polypeptide can be conveniently selected from any peptide library, including random peptide libraries, combinatorial peptide libraries, or biased peptide libraries. The term “biased” is used herein to mean that the method of generating the library is manipulated so as to restrict one or more parameters that govern the diversity of the resulting collection of molecules, in this case peptides.

[0902] Thus, a truly random peptide library would generate a collection of peptides in which the probability of finding a particular amino acid at a given position of the peptide is the same for all 20 amino acids. A bias can be introduced into the library, however, by specifying, for example, that a lysine occur every fifth amino acid or that positions 4, 8, and 9 of a decapeptide library be fixed to include only arginine. Clearly, many types of biases can be contemplated, and the present invention is not restricted to any particular bias. Furthermore, the present invention contemplates specific types of peptide libraries, such as phage displayed peptide libraries and those that utilize a DNA construct comprising a lambda phage vector with a DNA insert.

[0903] As mentioned above, in the case of a binding molecule that is a polypeptide, the polypeptide may have about 6 to less than about 60 amino acid residues, preferably about 6 to about 10 amino acid residues, and most preferably, about 6 to about 22 amino acids. In another embodiment, a binding polypeptide has in the range of 15-100 amino acids, or 20-50 amino acids.

[0904] The selected binding polypeptide can be obtained by chemical synthesis or recombinant expression.

[0905] Other Activities

[0906] An albumin fusion protein of the invention and/or polynucleotide encoding an albumin fusion protein of the invention, may be employed in treatment for stimulating re-vascularization of ischemic tissues due to various disease conditions such as thrombosis, arteriosclerosis, and other cardiovascular conditions. The albumin fusion proteins of the invention and/or polynucleotides encoding albumin fusion proteins of the invention may also be employed to stimulate angiogenesis and limb regeneration, as discussed above.

[0907] An albumin fusion protein of the invention and/or polynucleotide encoding an albumin fusion protein of the invention may also be employed for treating wounds due to injuries, burns, post-operative tissue repair, and ulcers since they are mitogenic to various cells of different origins, such as fibroblast cells and skeletal muscle cells, and therefore, facilitate the repair or replacement of damaged or diseased tissue.

[0908] An albumin fusion protein of the invention and/or polynucleotide encoding an albumin fusion protein of the invention may also be employed stimulate neuronal growth and to treat and prevent neuronal damage which occurs in certain neuronal disorders or neuro-degenerative conditions such as Alzheimer's disease, Parkinson's disease, and AIDS-related complex. An albumin fusion protein of the invention and/or polynucleotide encoding an albumin fusion protein of the invention may have the ability to stimulate chondrocyte growth, therefore, they may be employed to enhance bone and periodontal regeneration and aid in tissue transplants or bone grafts.

[0909] An albumin fusion protein of the invention and/or polynucleotide encoding an albumin fusion protein of the invention may be also be employed to prevent skin aging due to sunburn by stimulating keratinocyte growth.

[0910] An albumin fusion protein of the invention and/or polynucleotide encoding an albumin fusion protein of the invention may also be employed for preventing hair loss, since FGF family members activate hair-forming cells and promotes melanocyte growth. Along the same lines, an albumin fusion protein of the invention and/or polynucleotide encoding an albumin fusion protein of the invention may be employed to stimulate growth and differentiation of hematopoietic cells and bone marrow cells when used in combination with other cytokines.

[0911] An albumin fusion protein of the invention and/or polynucleotide encoding an albumin fusion protein of the invention may also be employed to maintain organs before transplantation or for supporting cell culture of primary tissues. An albumin fusion protein of the invention and/or polynucleotide encoding an albumin fusion protein of the invention may also be employed for inducing tissue of mesodermal origin to differentiate in early embryos.

[0912] An albumin fusion protein of the invention and/or polynucleotide encoding an albumin fusion protein of the invention may also increase or decrease the differentiation or proliferation of embryonic stem cells, besides, as discussed above, hematopoietic lineage. An albumin fusion protein of the invention and/or polynucleotide encoding an albumin fusion protein of the invention may also be used to modulate mammalian characteristics, such as body height, weight, hair color, eye color, skin, percentage of adipose tissue, pigmentation, size, and shape (e.g., cosmetic surgery). Similarly, an albumin fusion protein of the invention and/or polynucleotide encoding an albumin fusion protein of the invention may be used to modulate mammalian metabolism affecting catabolism, anabolism, processing, utilization, and storage of energy.

[0913] An albumin fusion protein of the invention and/or polynucleotide encoding an albumin fusion protein of the invention may be used to change a mammal's mental state or physical state by influencing biorhythms, caricadic rhythms, depression (including depressive disorders), tendency for violence, tolerance for pain, reproductive capabilities (preferably by Activin or Inhibin-like activity), hormonal or endocrine levels, appetite, libido, memory, stress, or other cognitive qualities.

[0914] An albumin fusion protein of the invention and/or polynucleotide encoding an albumin fusion protein of the invention may also be used as a food additive or preservative, such as to increase or decrease storage capabilities, fat content, lipid, protein, carbohydrate, vitamins, minerals, cofactors or other nutritional components.

[0915] The above-recited applications have uses in a wide variety of hosts. Such hosts include, but are not limited to, human, murine, rabbit, goat, guinea pig, camel, horse, mouse, rat, hamster, pig, micro-pig, chicken, goat, cow, sheep, dog, cat, non-human primate, and human. In specific embodiments, the host is a mouse, rabbit, goat, guinea pig, chicken, rat, hamster, pig, sheep, dog or cat. In preferred embodiments, the host is a mammal. In most preferred embodiments, the host is a human.

[0916] Having generally described the invention, the same will be more readily understood by reference to the following examples, which are provided by way of illustration and are not intended as limiting.

[0917] Without further description, it is believed that one of ordinary skill in the art can, using the preceding description and the following illustrative examples, make and utilize the alterations detected in the present invention and practice the claimed methods. The following working examples therefore, specifically point out preferred embodiments of the present invention, and are not to be construed as limiting in any way the remainder of the disclosure.

### EXAMPLES

### Example 1

### Preparation of HA-hGH Fusion Proteins

[0918] An HA-hGH fusion protein was prepared as follows:

[0919] Cloning of hGH cDNA

[0920] The hGH cDNA was obtained from a human pituitary gland cDNA library (catalogue number HL1097v, Clontech Laboratories, Inc) by PCR amplification. Two oligonucleotides suitable for PCR amplification of the hGH cDNA, HGH1 and HGH2, were synthesized using an Applied Biosystems 380B Oligonucleotide Synthesizer.

(SEQ ID NO: 1)

| | |
|---|---|
| HGH1: | 5′-CCCAAGAATTCCCTTATCCAGGC-3′ |

(SEQ ID NO: 2)

| | |
|---|---|
| HGH2: | 5′-GGGAAGCTTAGAAGCCACAGGATCCCTCCACAG-3′ |

[0921] HGH 1 and HGH2 differed from the equivalent portion of the hGH cDNA sequence (Martial et. al., 1979) by two and three nucleotides, respectively, such that after PCR amplification an EcoRI site would be introduced to the 5′ end of the cDNA and a BamH1 site would be introduced into the 3′ end of the cDNA. In addition, HGH2 contained a HindIII site immediately downstream of the hGH sequence.

[0922] PCR amplification using a Perkin-Elmer-Cetus Thermal Cycler 9600 and a Perkin-Elmer-Cetus PCR kit, was performed using single-stranded DNA template isolated from the phage particles of the cDNA library as follows: 10 μL phage particles were lysed by the addition of 10 μL phage lysis buffer (280 μg/mL proteinase K in TE buffer) and incubation at 55° C. for 15 min followed by 85° C. for 15 min. After a 1 min. incubation on ice, phage debris was pelleted by centrifugation at 14,000 rpm for 3 min. The PCR mixture contained 6 μL of this DNA template, 0.1 μM of each primer and 200 μM of each deoxyribonucleotide. PCR was carried out for 30 cycles, denaturing at 94° C. for 30 s, annealing at 65° C. for 30 s and extending at 72° C. for 30 s, increasing the extension time by 1 s per cycle.

[0923] Analysis of the reaction by gel electrophoresis showed a single product of the expected size (589 base pairs).

[0924] The PCR product was purified using Wizard PCR Preps DNA Purification System (Promega Corp) and then digested with EcoRI and HindIII. After further purification of the EcoRI-HindIII fragment by gel electrophoresis, the product was cloned into pUC19 (GIBCO BRL) digested with EcoRI and HindIII, to give pHGH1. DNA sequencing of the EcoRI HindIII region showed that the PCR product was identical in sequence to the hGH sequence (Martial et al., 1979), except at the 5′ and 3′ ends, where the EcoRI and BamHI sites had been introduced, respectively.

[0925] Expression of the hGH cDNA.

[0926] The polylinker sequence of the phagemid pBluescribe (+) (Stratagene) was replaced by inserting an oligonucleotide linker, formed by annealing two 75-mer oligonucleotides, between the EcoRI and HindIII sites to form pBST(+). The new polylinker included a unique NotI site.

[0927] The NotI HA expression cassette of pAYE309 (EP 431 880) comprising the PRBI promoter, DNA encoding the HA/MF -I hybrid leader sequence, DNA encoding HA and the ADH1 terminator, was transferred to pBST(+) to form pHA1. The HA coding sequence was removed from this plasmid by digestion with HindIII followed by religation to form pHA2.

[0928] Cloning of the hGH cDNA, as described in Example 1, provided the hGH coding region lacking the pro-hGH sequence and the first 8 base pairs (bp) of the mature hGH sequence. In order to construct an expression plasmid for secretion of hGH from yeast, a yeast promoter, signal peptide and the first 8 bp of the hGH sequence were attached to the 5′ end of the cloned hGH sequence as follows: The HindIII-SfaNI fragment from pHA 1 was attached to the 5′ end of the EcoRI/HindIII fragment from pHGHI via two synthetic oligonucleotides, HGH3 and HGH4 (which can anneal to one another in such a way as to generate a double stranded fragment of DNA with sticky ends that can anneal with SfaNIand EcoRI sticky ends):

| | | |
|---|---|---|
| HGH3: | 5′-GATAAAGATTCCCAAC-3′ | (SEQ ID NO: 3) |
| HGH4: | 5′-AATTGTTGGGAATCTTT-3′ | (SEQ ID NO: 4) |

[0929] The HindIII fragment so formed was cloned into HindIII-digested pHA2 to make pHGH2, such that the hGH cDNA was positioned downstream of the PRBI promoter and HA/MF -1 fusion leader sequence (WO 90/01063). The NotI expression cassette contained in pHGH2, which included the ADHI terminator downstream of the hGH cDNA, was cloned into NotI-digested pSAC35 (Sleep et al., BioTechnology 8:42 (1990)) to make pHGH12. This plasmid comprised the entire 2 μm plasmid to provide replication functions and the LEU2 gene for selection of transformants.

[0930] pHGH12 was introduced into S. cerevisiae D88 by transformation and individual transformants were grown for 3 days at 30° C. in 10 mL YEPD (1% w/v yeast extract, 2% w/v, peptone, 2% w/v, dextrose).

[0931] After centrifugation of the cells, the supernatants were examined by SDS-polyacrylamide gel electrophoresis (SDS-PAGE) and were found to contain protein which was of the expected size and which was recognized by anti-hGH antiserum (Sigma, Poole, UK) on Western blots.

[0932] Cloning and Expression of an HA-hGH Fusion Protein.

[0933] In order to fuse the HA cDNA to the 5′ end of the hGH cDNA, the pHA1 HindIII-Bsu361 fragment (containing most of the HA cDNA) was joined to the pHGH1 EcoRI-HindIII fragment (containing most of the hGH cDNA) via two oligonucleotides, HGH7 and HGH8

| | | |
|---|---|---|
| HGH7: | 5′-TTAGGCTTATTCCCAAC 3′ | (SEQ ID NO: 5) |
| HGH8: | 5′-AATTGTTGGGAATAAGCC 3′ | (SEQ ID NO: 6) |

[0934] The HindIII fragment so formed was cloned into pHA2 digested with HindIII to make pHGH10, and the NotI expression cassette of this plasmid was cloned into NotI-digested pSAC35 to make pHGH16.

[0935] pHGH16 was used to transform S. cerevisiae D88 and supernatants of cultures were analyzed as described above. A predominant band was observed that had a molecular weight of approximately 88 kD, corresponding to the combined masses of HA and hGH. Western blotting using anti-HA and anti-hGH antisera (Sigma) confirmed the presence of the two constituent parts of the albumin fusion protein.

[0936] The albumin fusion protein was purified from culture supernatant by cation exchange chromatography, followed by anion exchange and gel permeation chromatography. Analysis of the N-terminus of the protein by amino acid sequencing confirmed the presence of the expected albumin sequence.

[0937] An in vitro growth hormone activity assay (Ealey et al, Growth Regulation 5:36 (1995)) indicated that the albumin fusion protein possessed full hGH activity. In a hypophysectomised rat weight gain model, performed essentially as described in the European Pharmacopoeia (1987, monograph 556), the fusion molecule was more potent than hGH when the same number of units of activity (based on the above in vitro assay) were administered daily. Further experiments in which the albumin fusion protein was administered once every four days showed a similar overall growth response to a daily administration of hGH. Pharmacokinetic experiments in which ¹²⁵I-labeled protein was administered to rats indicated an approximately ten-fold increase in circulatory half-life for the albumin fusion protein compared to hGH.

[0938] A similar plasmid was constructed in which DNA encoding the S. cerevisiae invertase (SUC2) leader sequence replaced the sequence for the hybrid leader, such that the encoded leader and the junction (↓) with the HA sequence were as follows:

(SEQ ID NO: 7)

. . . MLLQAFLFLLAGFAAKISA ↓ DAHKS . . .
Invertase leader
HA sequence . . .

[0939] On introduction into S. cerevisiae DBI, this plasmid directed the expression and secretion of the albumin fusion protein at a level similar to that obtained with pHGH16. Analysis of the N-terminus of the albumin fusion protein indicated precise and efficient cleavage of the leader sequence from the mature protein.

[0940] Cloning and Expression of an hGH-HA Fusion Protein.

[0941] In order to fuse the hGH cDNA to the 5′ end of the HA cDNA, the HA cDNA was first altered by site-directed mutagenesis to introduce an EcoNI site near the 5′ end of the coding region. This was done by the method of Kunkel et al. (Methods in Enzymol. 154:367 (1987)) using single-stranded DNA template prepared from pHAI and a synthetic oligonucleotide, LEU4:

| | | |
|---|---|---|
| LEU4: | 5′-GAGATGCACACCTGAGTGAGG-3′ | (SEQ ID NO: 8) |

[0942] Site-directed mutagenesis using this oligonucleotide changed the coding sequence of the HA cDNA from Lys4 to Leu4 (K4L). However, this change was repaired when the hGH cDNA was subsequently joined at the 5′ end by linking the pHGH2 NotI-BamHI fragment to the EcoNI-NotI fragment of the mutated pHAI, via the two oligonucleotides HGH5 and HGH6:

| | |
|---|---|
| HGH5: | |
| 5′-GATCCTGTGGCTTCGATGCACACAAGA-3′ | (SEQ ID NO: 9) |
| HGH6: | |
| 5′-CTCTTGTGTGCATCGAAGCCACAG-3′ | (SEQ ID NO: 10) |

[0943] The NotI fragment so formed was cloned into NotI-digested pSAC35 to make pHGH14. pHGH14 was used to transform S. cerevisiae D88 and supernatants of culture were analyzed as above. A predominant band was observed that had a molecular weight of approximately 88 kD, corresponding to the combined masses of hGH and HA. Western blotting using anti-HA and anti-hGH antisera confirmed the presence of the two constituent parts of the albumin fusion protein.

[0944] The albumin fusion protein was purified from culture supernatant by cation exchange chromatography, followed by anion exchange and gel permeation chromatography. Analysis of the N-terminus of the protein by amino acid sequencing confirmed the presence of the expected hGH sequence.

[0945] In vitro studies showed that the albumin fusion protein retained hGH activity, but was significantly less potent than an albumin fusion protein comprising full length HA (1-585) as the N-terminal portion and hGH as the C-terminal portion, as described above.

[0946] Construction of Plasmids for the Expression of hGH Fusions to Domains of HA.

[0947] Fusion polypeptides were made in which the hGH molecule was fused to the first two domains of HA (residues 1 to 387). Fusion to the N terminus of hGH was achieved by joining the pHA1 HindIII-Sap1 fragment, which contained most of the coding sequence for domains 1 and 2 of HA, to the pHGHI EcoR1-HindIII fragment, via the oligonucleotides HGH 11 and HGH 12:

(SEQ ID NO: 11)

| | |
|---|---|
| HGH11: | 5′-TGTGGAAGAGCCTCAGAATTTATTCCCAAC-3′ |

(SEQ ID NO: 12)

| | |
|---|---|
| HGH12: | 5′-AATTGTTGGGAATAAATTCTGAGGCTCTTCC-3′ |

[0948] The HindIII fragment so formed was cloned into HindIII-digested pHA2 to make pHGH37 and the Not1 expression cassette of this plasmid was cloned into Not1-digested pSAC35.

[0949] The resulting plasmid, pHGH38, contained an expression cassette that was found to direct secretion of the fusion polypeptide into the supernatant when transformed into S. cerevisiae DB 1. Western blotting using anti-HA and anti-hGH antisera confirmed the presence of the two constituent parts of the albumin fusion protein.

[0950] The albumin fusion protein was purified from culture supernatant by cation exchange chromatography followed by gel permeation chromatography.

[0951] In vivo studies with purified protein indicated that the circulatory half-life was longer than that of hGH, and similar to that of an albumin fusion protein comprising full-length HA (1-585) as the N-terminal portion and hGH as the C-terminal portion, as described above. In vitro studies showed that the albumin fusion protein retained hGH activity.

[0952] Using a similar strategy as detailed above, an albumin fusion protein comprising the first domain of HA (residues 1-194) as the N-terminal portion and hGH as the C-terminal portion, was cloned and expressed in S. cerevisiae DBL. Western blotting of culture supernatant using anti-HA and anti-hGH antisera confirmed the presence of the two constituent parts of the albumin fusion protein.

[0953] Fusion of HA to hGH Using a Flexible Linker Sequence

[0954] Flexible linkers, comprising repeating units of [Gly-Gly-Gly-Gly-Ser]ₙ, where n was either 2 or 3, were introduced between the HA and hGH albumin fusion protein by cloning of the oligonucleotides HGH16, HGH17, HGH18 and HGH19:

| HGH16: | |
|---|---|
| 5′-TTAGGCTTAGGTGGCGGTGGATCCGGCGGTG | (SEQ ID NO: 13) |
| GTGGATCTTTCCCA AC-3′ | |
| HGH17: | |
| 5′-AATTGTTGGGAAAGATCCACCACCGCCGGAT | (SEQ ID NO: 14) |
| CCACCGCCACCTAAGCC-3′ | |
| HGH18: | |
| 5′-TTAGGCTTAGGCGGTGGTGGATCTGGTGGCG | (SEQ ID NO: 15) |
| GCGGATCTGGTGGCGGTGGATCCTTCCCAAC-3′ | |
| HGH19: | |
| 5′-AATTGTTGGGAAGGATCCACCGCCACCAGAT | (SEQ ID NO: 16) |
| CCGCCGCCACCAGATCCACCACCGCCTAAGCC- | |
| 3′ | |

[0955] Annealing of HGH16 with HGH17 resulted in n=2, while HGH18 annealed to HGH19 resulted in n=3. After annealing, the double-stranded oligonucleotides were cloned with the EcoRI-Bsu361 fragment isolated from pHGH1 into Bsu361-digested pHGH10 to make pHGH56 (where n=2) and pHGH57 (where n=3). The NotI expression cassettes from these plasmids were cloned into NotI-digested pSAC35 to make pHGH58 and pHGH59, respectively.

[0956] Cloning of the oligonucleotides to make pHGH56 and pHGH57 introduced a BamHI site in the linker sequences. It was therefore possible to construct linker sequences in which n=1 and n=4, by joining either the HindIII-BamHI fragment from pHGH56 to the BamHI-HindIII fragment from pHGH57 (making n=1), or the HindIII-BamHI fragment from pHGH57 to the BamHI-HindIII fragment from pHGH56 (making n=2). Cloning of these fragments into the HindIII site of pHA2, resulted in pHGH60 (n=1) and pHGH61 (n=4). The NotI expression cassettes from pHGH60 and pHGH61 were cloned into NotI-digested pSAC35 to make pHGH62 and pHGH63, respectively.

[0957] Transformation of S. cerevisiae with pHGH58, pHGH59, pHGH62 and pHGH63 resulted in transformants that secreted the fusion polypeptides into the supernatant. Western blotting using anti-HA and anti-hGH antisera confirmed the presence of the two constituent parts of the albumin fusion proteins.

[0958] The albumin fusion proteins were purified from culture supernatant by cation exchange chromatography, followed by anion exchange and gel permeation chromatography. Analysis of the N-termini of the proteins by amino acid sequencing confirmed the presence of the expected albumin sequence. Analysis of the purified proteins by electrospray mass spectrometry confirmed an increase in mass of 315 D (n−1), 630 D (n=2), 945 D (n=3) and 1260 D (n=4) compared to the HA-hGH fusion protein described above. The purified protein was found to be active in vitro.

[0959] Increased Shelf-Life of HA-hGH Fusion Proteins: Methods

[0960] HA-hGH and hGH were separately diluted in cell culture media containing 5% horse serum to final concentrations of 100-200 μg/ml and incubated at 4, 37 or 50° C. At time zero and at weekly intervals thereafter, aliquots of the samples were tested for their biological activity in the Nb2 cell proliferation assay, and the data normalized to the biological activity of the control (hGH solution at time zero). In other assays hGH and HA-hGH were incubated in phosphate buffer saline in at 4, 37 and 50 degree C.

[0961] Nb2 cell proliferation assay: The growth of these cells is dependent on hGH or other lactogenic hormones. In a typical experiment 10⁴ cells/well are plated in 96-well plate in the presence of different concentration of hGH or HA-hGH in media such as DMEM containing 5-10% horse serum for 24-48 hrs in the incubator. After the incubation period, 1:10 volume of MTT (5 mg/ml in H₂O) is added to each well and the plate is incubated for a further 6-16 hrs. The growing cells convert MTT to insoluble formazan. The formazan is solublized by acidic isopropanol, and the color produced is measured at 570 nm on microtiter plate reader. The extent of formazan formation reflects the level of cellular proliferation.

[0962] Increased Shelf-Life of HA-hGH Fusion Proteins: Results

[0963] The fusion of Therapeutic proteins to albumin confers stability in aqueous or other solution. FIG. 1 depicts the extended shelf-life of an HA fusion protein in terms of the biological activity of HA-hGH remaining after storage in cell culture media for up to 5 weeks at 37° C. A solution of 200 μg/ml HA-hGH was prepared in tissue culture media containing 5% horse serum, and the solution incubated at 37° C. starting at time zero. At the indicated times, a sample was removed and tested for its biological activity in the Nb2 cell assay, at 2 ng/ml final concentration. As shown in FIG. 1, the biological activity of HA-hGH remains essentially intact (within experimental variation) after 5 weeks of incubation at 37° C. The recombinant hGH used as control for this experiment lost its biological activity in the first week of the experiment.

[0964] FIG. 2 shows the stability of HA-hGH after storage in cell culture media for up to 3 weeks at 4, 37, or 50° C. At time zero, a solution of HA-hGH was prepared in tissue culture media containing 5% horse serum, and incubated at 4, 37, and 50° C. At the indicated periods a sample was removed and assayed for its biological activity in the Nb2 cell proliferation assay, at 60 ng/ml final concentration. HA-hGH retains over 90% of its initial activity at all temperatures tested for at least 3 weeks after incubation while hGH loses its biological activity within the first week. This level of activity is further retained for at least 7 weeks at 37° C. and 5 weeks at 50° C. These results indicate that HA-hGH is highly stable in aqueous solution even under temperature stress.

[0965] FIGS. 3A and 3B show the stable biological activity of HA-hGH compared to hGH in the Nb2 cell proliferation assay. Nb2 cells were grown in the presence of increasing concentrations of recombinant hGH or HA-hGH, added at time zero. The cells were incubated for 24 or 48 hours before measuring the extent of proliferation by the MTT method. The increased stability of HA-hGH in the assay results in essentially the same proliferative activity at 24 hours (FIG. 3A) as at 48 hours (FIG. 3B) while hGH shows a significant reduction in its proliferative activity after 48 hours of incubation (FIGS. 3A and 3B). Compared to hGH, the HA-hGH has lower biological potency after 1 day; the albumin fusion protein is about 5 fold less potent than hGH. However, after 2 days the HA-hGH shows essentially the same potency as hGH due to the short life of hGH in the assay. This increase in the stability of the hGH as an albumin fusion protein has a major unexpected impact on the biological activity of the protein. Although the potency of the albumin fusion proteins is slightly lower than the unfused counterparts in rapid bioassays, their biological stability results in much higher biological activity in the longer term in vitro assay or in vivo assays.

### Example 2

### Preparation of HA-Fusion Proteins

[0966] FIG. 4 shows a map of a plasmid (pPPC0005) that can be used as the base vector for cloning the cDNAs of therapeutic partners to form HA-fusions. For example, digestion of this vector with the restriction enzymes Bsu36I/Partial HindIII will allow for the insertion of a cDNA modified at the 5′ end to encode the last 5 amino acids of HA including the Bsu36I site and at the 3′ end to include a double stop codon and HindIII site. As another example, digestion of this vector with the restriction enzymes Bsu3611, SphI allows for the insertion of a cDNA modified at the 5′ end to encode the last 5 amino acids of HA including the Bsu36I site and at the 3′ end to include a double stop codon, HindIII site and the ADHI terminator sequence up to and including the SphI site.

[0967] This plasmid may easily be modified by one of skill in the art, for example, to modify, add or delete restriction sites so that one may more easily clone a Therapeutic protein, or fragment or variant of into the vector for the purpose of making an albumin fusion protein of the invention.

[0968] For example, for the purpose of making an albumin fusion protein where the Therapeutic moiety is placed N-terminal to the (mature) albumin protein, restriction sites were added at the 5′ end of the DNA encoding HA in pPPC0005 shown in FIG. 4).

[0969] Because it was desired to add unique XhoI and ClaI sites at the 5′ end of the DNA encoding the HA protein in pPPC0005, it was first necessary to remove those same sites from the plasmid (located 3′ of the ADH1 terminator sequence). This was accomplished by cutting pPPC0005 with XhoI and ClaI, filling in the sticky ends with T4 DNA polymerase, and religating the blunt ends to create pPPC0006

[0970] Engineering the Xho and Cla I restriction sites into the Fusion leader sequence just 5′ of the DNA encoding the HA protein in pPPC0006 was accomplished using two rounds of PCR. The first pair of oligonucleotides are those of SEQ ID NO:19 and SEQ ID NO:20. SEQ ID 19 contains four point mutations relative to the DNA sequence encoding the Fusion leaadr sequence and the beginning of the HA protein. These mutations are necessary to create the XhoI site in the fusion leader sequence and the Cla I site just at the beginning of the DNA encoding the HA protein. These four mutations are underlined in the sequence shown below. In pPPC0006 the nucleotides at these four positions from 5′ to 3′ are T, G, T, and G. 5′-GCCTCGAGAAAAGAGATGCACACAAGAGTGAGGTTGCTCATCGATTTAAAG ATTTGGG-3′ (SEQ ID NO:19) 5′-AATCGATGAGCAACCTCACTCTTGTGTGCATCTCTTTTCTCGAGGCTCCTGG AATAAGC-3′ (SEQ ID NO:20). A second round of PCR is then performed with an upstream flanking primer, 5′-TACAAACTTAAGAGTCCAATTAGC-3′ (SEQ ID NO:21) and a downstream flanking primer 5′-CACTTCTCTAGAGTGGTTTCATATGTCTT-3′ (SEQ ID NO:22). The resulting PCR product is then purified and then digested with AflI and XbaI and ligated into the same sites in pPPC0006 creating pScCHSA. The resulting plasmid will have an XhoI sites engineered into the fusion leader sequence. The presence of the XhoI site creates a single amino acid change in the end of fusion leader sequence from LDKR to LEKR. The D to E change will not be present in the final albumin fusion protein expression plasmid if one ligates into the XhoI and Cla I sites a fragment comprising the Therapeutic moiety which has a 5′ SalI sticky end (which is compatible with the XhoI end) and a 3′ClaI end. Ligation of the XhoI to the SalI restores the original amino acid sequence of the Fusion leader sequence. The therapeutic protein moiety may be inserted after the Kex2 site (Kex2 claeves after the dibasic amino acid sequence KR at the end of the Fusion leader sequence) and before the ClaI site.

[0971] In addition, for the purpose of making an albumin fusion protein where the Therapeutic moiety is placed C-terminal to the (mature) albumin protein, four, eight-base-pair restriction sites were added at the 3′ end of the DNA encoding HA in pScCHSA. As an example, it was felt to be desirable to incorporate AscI, FseI, and PmeI restriction sites in between the Bsu36I and HindIII sites at the end of the DNA encoding the HA protein in pScCHSA. This was accomplished through the use of two complementary synthetic oligonucleotides (SEQ ID NO:19 and SEQ ID NO:20) which contain the desired restriction sites. 5′-AAGCTGCCTTAGGCTTATAATAAGGCGCGCCGGCCGGCCGTTTAAACTAAG CTTAATTCT-3′ (SEQ ID NO:23) and 5-AGAATTAAGCTTAGTTTAAACGGCCGGCCGGCGCGCCTTATTATAAGCCTAA GGCAGCTT-3′ (SEQ ID NO:24). These oligonucleotides may be annealed and digested with Bsu36I and HindIII and ligated into the same sites located at the end of the DNA encoding the HA protein in pScCHSA creating pScNHSA, using techniques known in the art.

[0972] Making Vectors Comprising Albumin Fusion Proteins Where the Albumin Moiety is N-Terminal to the Therapeutic Moiety.

[0973] The DNA encoding the Therapeutic moiety may be PCR amplified using primers that will add DNA encoding the last five amino acids of the HA (and containing the Bsu36I site) onto the 5′ end of the DNA encoding a Therapeutic protein and a STOP codon and appropriate cloning sites onto the 3′ end of the coding sequence. For instance, the forward primer used to amplify the DNA encoding a therapeutic protein might have the sequence, 5′-aagctGCCTTAGGCTTA(N)₁₅-3′ (SEQ ID NO:25) where the underlined sequence is a Bsu36I site, the upper case nucleotides encode the last four amino acids of the mature HA protein (ALGL), and (N)₁₅ is identical to the first 15 nucleotides encoding the Therapetic protein of interest. Similarly, the reverse primer used to amplify the DNA encoding a therapeutic protein might have the sequence, 5′-GCGCGCGTTTAAACGGCCGGCCGGCGCGCCTTATTA(N)₁₅-3′ (SEQ ID NO:26) where the italicized nucleotides is a PmeI site, the double underlined nucleotides are a FseI site, the singly underlined text is a PmeI site, the boxed nucleotides are the reverse complement of two tandem stop codons, and (N)₁₅ is identical to the reverse complement of the last 15 nucleotides encoding the Therapeutic protein of interest. Once the PCR product is amplified it may be cut with Bsu36I and one of (AscI, FseI, or PmeI) and ligated into pScNHSA.

[0974] Making Vectors Comprising Albumin Fusion Proteins Where the Albumin Moiety is N-Terminal to the Therapeutic Moiety.

[0975] The DNA encoding the Therapeutic moiety may be PCR amplified using primers that will add DNA encoding the last three amino acids of the Fusion leader sequence (and containing a SalI site) onto the 5′ end of the DNA encoding a Therapeutic protein and the first few amino acids of the HA (and containing a ClaI site. For instance, the forward primer used to amplify the DNA encoding a therapeutic protein might have the sequence, 5′-aggagcgtcGACAAAAGA(N)₁₅-3′ (SEQ ID NO:27) where the underlined sequence is a Sal I site, the upper case nucleotides encode the last three amino acids of the Fusion leader sequence (DKR), and (N)₁₅ is identical to the first 15 nucleotides encoding the Therapetic protein of interest. Similarly, the reverse primer used to amplify the DNA encoding a therapeutic protein might have the sequence, 5′-CTTTAAATCGATGAGCAACCTCACTCTTGTGTGCATC(N)₁₅-3′ (SEQ ID NO:28) where the italicized nucleotides are a ClaI site, the underlined nucleotides are the reverse complement of the DNA encoding the first 9 amino acids of HA (DAHKSEVAH), and (N)₁₅ is identical to the reverse complement of the last 15 nucleotides encoding the Therapeutic protein of interest. Once the PCR product is amplified it may be cut with SalI and ClaI and ligated into pScCHSA digested with XhoI and Cla I.

[0976] Expression of an Albumin Fusion Protein in Yeast.

[0977] The Not I fragment containing the DNA encoding either an N-terminal or C-terminal albumin fusion protein generated from pScCHSA or pScNHSA may then be cloned in to the NotI site of pSAC35.

[0978] Expression of an Albumin Fusion Protein from Mammalian Cell Lines

[0979] The HSA gene has also been cloned into a the pC4 vector which is more suitable for mammalian culture systems creating plasmid pC4:HSA. More specifically, pC4HSA was generated by PCR amplifying the mature HSA gene with a 5′ primer (SEQ ID NO:30) that anneals to the 5′ end of DNA encoding the mature form of the HSA protein (e.g, DNA in plasmid pScCHSA),incorporates BamHI (Shown in italics below) and HindIII (shown singly underlined below) cloning sites, attaches a kozak sequence (shown double underlined below) and DNA encoding the natural HSA signal peptide (MKWVSFISLLFLFSSAYSRSLDKR, SEQ ID NO:29) (shown in bold below), and a 3′ primer (SEQ ID NO:31) that anneals to the 3′ end of DNA encoding the mature form of the HSA protein and incorporates an Asp718 restriction site (shown in bold below). The DNA encoding the natural human serum albumin leader sequence in SEQ ID NO:30 also contains a modification that introduces a XhoI site that is boxed below.

(SEQ ID NO: 30)

5′-TCAGGGATCCAAGCTTCCGCCACCATGAAGTGGGTAACCTTTATTTC
CCTTCTTTTTCTCTTTAGCTCGGCTTA|CTCGAG|GGGTGTGTTTCGTCG
AGATGCACACAAGAGTGAG-3′

(SEQ ID NO: 31)

5″-GCAGCGGTACCGAATTCGGCGCGCCTTATAAGCCTAAGGCAGC-3′

[0980] This PCR product (1.85 kb) is then purified and digested with BamHI and Asp718 and cloned into the same sites in pC4 (ATCC Accession No. 209646) to produce pC4:HSA

[0981] Making Vectors Comprising Albumin Fusion Proteins Where the Albumin Moiety is C-Terminal to the Therapeutic Moiety Using the pC4:HSA Vector

[0982] Using pC4:HSA, albumin fusion proteins in which the Therapeutic protein moiety is N terminal to the albumin sequence, one can clone DNA encoding a Therapeutic protein that has its own signal sequence between the Bam HI (or HindIII) and ClaI sites. When cloning into either the BamHI or Hind III site remember to include Kozak sequence (CCGCCACCATG) prior to translational start codon of DNA encoding the Therapeutic Protein to be subcloned. If the Therapeutic does not have a signal sequence, the DNA encoding that Therapeutic protein may be cloned in between the XhoI and ClaI sites. When using the XhoI site, the following 5′ (SEQ ID NO:32) and 3′ (SEQ ID NO:33) PCR primers may be used:

(SEQ ID NO: 32)

5′-CCGCCGCTCGAGGGGTGTGTTTCGTCGA(N)₁₈-3′

(SEQ ID NO: 33)

5′-AGTCCCATCGATGAGCAACCTCACTCTTGTGTGCATC(N)₁₈-3′

[0983] In SEQ ID NO:32, the underlined sequence is an XhoI site; and the XhoI site and the DNA following the XhoI site encode for the last seven amino acids of the leader sequence of natural human serum albumin. In SEQ ID NO:33, the underlined sequence is a ClaI site; and the ClaI site and the DNA following it encode are the reverse complement of the DNA encoding the first 10 amino acids of themature HSA protein (SEQ ID NO:18). In SEQ ID NO:32 “(N)₁₈” is DNA identical to the first 18 nucleotides encoding the Therapeutic protein of interest.). In SEQ ID NO:33 “(N)₁₈” is the reverse complement of DNA encoding the last 18 nucleotides encoding the Therapeutic protein of interest. Using these two primers, one may PCR amplify the Therapeutic protein of interest, purify the PCR product, digest it with XhoI and ClaI restriction enzymes and then and clone it into the with XhoI and ClaI sites in the pC4:HSA vector.

[0984] Making Vectors Comprising Albumin Fusion Proteins Where the Albumin Moiety is N-Terminal to the Therapeutic Moiety Using the pC4:HSA Vector

[0985] Using pC4:HSA, albumin fusion proteins in which the Therapeutic protein moiety is N terminal to the albumin sequence, one can clone DNA encoding a Therapeutic protein between the Bsu36I and AscI restriction sites. When cloning into the Bsu36I and AscI, the same primer design used to clone in the yeast vector system (SEQ ID NO:25 and 26) may be employed.

[0986] The pC4 vector is especially suitable for expression of albumin fusion proteins from CHO cells. For expression, in other mammalian cell types, e.g., NSO cells, it may be useful to subclone the HindIII-EcoRI fragment containing the DNA encoding an albumin fusion protein (from a pC4 vector in which the DNA encoding the Therapeutic protein has already been cloned in frame with the DNA encoding (the mature form of) human serum albumin) into another expression vector (such as any of the mammalian expression vectors described herein).

### Example 3

### Preparation of HA-Cytokine or HA-Growth Factor Fusion Proteins (such as EPO, GMCSF, GCSF)

[0987] The cDNA for the cytokine or growth factor of interest, such as EPO, can be isolated by a variety of means including from cDNA libraries, by RT-PCR and by PCR using a series of overlapping synthetic oligonucleotide primers, all using standard methods. The nucleotide sequences for all of these proteins are known and available, for instance, in U.S. Pat. Nos. 4,703,008, 4,810,643 and 5,908,763. The cDNA can be tailored at the 5′ and 3′ ends to generate restriction sites, such that oligonucleotide linkers can be used, for cloning of the cDNA into a vector containing the cDNA for HA. This can be at the N or C-terminus with or without the use of a spacer sequence. EPO (or other cytokine) cDNA is cloned into a vector such as pPPC0005 (FIG. 4), pScCHSA, pScNHSA, or pC4:HSA from which the complete expression cassette is then excised and inserted into the plasmid pSAC35 to allow the expression of the albumin fusion protein in yeast. The albumin fusion protein secreted from the yeast can then be collected and purified from the media and tested for its biological activity. For expression in mammalian cell lines, a similar procedure is adopted except that the expression cassette used employs a mammalian promoter, leader sequence and terminator (See Example 2). This expression cassette is then excised and inserted into a plasmid suitable for the transfection of mammalian cell lines.

### Example 4

### Preparation of HA-IFN Fusion Proteins (such as IFNα)

[0988] The cDNA for the interferon of interest such as IFNα can be isolated by a variety of means including but not exclusively, from cDNA libraries, by RT-PCR and by PCR using a series of overlapping synthetic oligonucleotide primers, all using standard methods. The nucleotide sequences for interferons, such as IFNα are known and available, for instance, in U.S. Pat. Nos. 5,326,859 and 4,588,585, in EP 32 134, as well as in public databases such as GenBank. The cDNA can be tailored at the 5′ and 3′ ends to generate restriction sites, such that oligonucleotide linkers can be used to clone the cDNA into a vector containing the cDNA for HA. This can be at the N or C-terminus of the HA sequence, with or without the use of a spacer sequence. The IFNα (or other interferon) cDNA is cloned into a vector such as pPPC0005 (FIG. 4), pScCHSA, pScNHSA, or pC4:HSA from which the complete expression cassette is then excised and inserted into the plasmid pSAC35 to allow the expression of the albumin fusion protein in yeast (see FIG. 8). The albumin fusion protein secreted from the yeast can then be collected and purified from the media and tested for its biological activity. For expression in mammalian cell lines a similar procedure is adopted except that the expression cassette used employs a mammalian promoter, leader sequence and terminator (See Example 2). This expression cassette is then excised and inserted into a plasmid suitable for the transfection of mammalian cell lines.

[0989] Maximum Protein Recovery from Vials

[0990] The albumin fusion proteins of the invention have a high degree of stability even when they are packaged at low concentrations. In addition, in spite of the low protein concentration, good fusion-protein recovery is observed even when the aqueous solution includes no other protein added to minimize binding to the vial walls. FIG. 5 compares the recovery of vial-stored HA-IFN solutions with a stock solution. 6 or 30 μg/ml HA-IFN solutions were placed in vials and stored at 4° C. After 48 or 72 hrs a volume originally equivalent to 10 ng of sample was removed and measured in an IFN sandwich ELISA. The estimated values were compared to that of a high concentration stock solution. As shown, there is essentially no loss of the sample in these vials, indicating that addition of exogenous material such as albumin is not necessary to prevent sample loss to the wall of the vials

[0991] In vivo Stability and Bioavailability of HA-α-IFN Fusions

[0992] To determine the in vivo stability and bioavailability of a HA-α-IFN fusion molecule, the purified fusion molecule (from yeast) was administered to monkeys at the dosages and time points described in FIGS. 6 and 7. Pharmaceutical compositions formulated from HA-α-IFN fusions may account for the extended serum half-life and bioavailability exemplified in FIGS. 6 and 7. Accordingly, pharmaceutical compositions may be formulated to contain lower dosages of alpha-interferon activity compared to the native alpha-interferon molecule.

[0993] Pharmaceutical compositions containing HA-α-IFN fusions may be used to treat or prevent disease in patients with any disease or disease state that can be modulated by the administration of α-IFN. Such diseases include, but are not limited to, hairy cell leukemia, Kaposi's sarcoma, genital and anal warts, chronic hepatitis B, chronic non-A, non-B hepatitis, in particular hepatitis C, hepatitis D, chronic myelogenous leukemia, renal cell carcinoma, bladder carcinoma, ovarian and cervical carcinoma, skin cancers, recurrent respirator papillomatosis, non-Hodgkin's and cutaneous T-cell lymphomas, melanoma, multiple myeloma, A/DS, multiple sclerosis, gliobastoma, etc. (see Interferon Alpha, In: AHFS Drug Information, 1997.

[0994] Accordingly, the invention includes pharmaceutical compositions containing a HA-α-IFN fusion protein, polypeptide or peptide formulated with the proper dosage for human administration. The invention also includes methods of treating patients in need of such treatment comprising at least the step of administering a pharmaceutical composition containing at least one HA-α-IFN fusion protein, polypeptide or peptide.

[0995] Bifunctional HA- -IFN Fusions

[0996] The HA-α-IFN expression vector of FIG. 8 is modified to include an insertion for the expression of bifunctional HA-α-IFN fusion proteins. For instance, the cDNA for a second protein of interest may be inserted in frame downstream of the “rHA-IFN” sequence after the double stop codon has been removed or shifted downstream of the coding sequence.

[0997] In one version of a bifunctional HA-α-IFN fusion protein, an antibody or fragment against B-lymphocyte stimulator protein (GenBank Acc 4455139) or polypeptide may be fused to one end of the HA component of the fusion molecule. This bifunctional protein is useful for modulating any immune response generated by the α-IFN component of the fusion.

### Example 5

### Preparation of HA-Hormone Fusion Protein (such as Insulin, LH, FSH)

[0998] The cDNA for the hormone of interest such as insulin can be isolated by a variety of means including but not exclusively, from cDNA libraries, by RT-PCR and by PCR using a series of overlapping synthetic oligonucleotide primers, all using standard methods. The nucleotide sequences for all of these proteins are known and available, for instance, in public databases such as GenBank. The cDNA can be tailored at the 5′ and 3′ ends to generate restriction sites, such that oligonucleotide linkers can be used, for cloning of the cDNA into a vector containing the cDNA for HA. This can be at the N or C-terminus with or without the use of a spacer sequence. The hormone cDNA is cloned into a vector such as pPPC0005 (FIG. 4), pScCHSA, pScNHSA, or pC4:HSA from which the complete expression cassette is then excised and inserted into the plasmid pSAC35 to allow the expression of the albumin fusion protein in yeast. The albumin fusion protein secreted from the yeast can then be collected and purified from the media and tested for its biological activity. For expression in mammalian cell lines a similar procedure is adopted except that the expression cassette used employs a mammalian promoter, leader sequence and terminator (See Example 2). This expression cassette is then excised and inserted into a plasmid suitable for the transfection of mammalian cell lines.

### Example 6

### Preparation of HA-Soluble Receptor or HA-Binding Protein Fusion Protein such as HA-TNF Receptor

[0999] The cDNA for the soluble receptor or binding protein of interest such as TNF receptor can be isolated by a variety of means including but not exclusively, from cDNA libraries, by RT-PCR and by PCR using a series of overlapping synthetic oligonucleotide primers, all using standard methods. The nucleotide sequences for all of these proteins are known and available, for instance, in GenBank. The cDNA can be tailored at the 5′ and 3′ ends to generate restriction sites, such that oligonucleotide linkers can be used, for cloning of the cDNA into a vector containing the cDNA for HA. This can be at the N or C-terminus with or without the use of a spacer sequence. The receptor cDNA is cloned into a vector such as pPPC0005 (FIG. 4), pScCHSA, pScNHSA, or pC4:HSA from which the complete expression cassette is then excised and inserted into the plasmid pSAC35 to allow the expression of the albumin fusion protein in yeast. The albumin fusion protein secreted from the yeast can then be collected and purified from the media and tested for its biological activity. For expression in mammalian cell lines a similar procedure is adopted except that the expression cassette used employs a mammalian promoter, leader sequence and terminator (See Example 2). This expression cassette is then excised and inserted into a plasmid suitable for the transfection of mammalian cell lines.

### Example 7

### Preparation of HA-Growth Factors such as HA-IGF-1 Fusion Protein

[1000] The cDNA for the growth factor of interest such as IGF-1 can be isolated by a variety of means including but not exclusively, from cDNA libraries, by RT-PCR and by PCR using a series of overlapping synthetic oligonucleotide primers, all using standard methods (see GenBank Acc. No.NP_{—}000609). The cDNA can be tailored at the 5′ and 3′ ends to generate restriction sites, such that oligonucleotide linkers can be used, for cloning of the cDNA into a vector containing the cDNA for HA. This can be at the N or C-terminus with or without the use of a spacer sequence. The growth factor cDNA is cloned into a vector such as pPPC0005 (FIG. 4), pScCHSA, pScNHSA, or pC4:HSA from which the complete expression cassette is then excised and inserted into the plasmid pSAC35 to allow the expression of the albumin fusion protein in yeast. The albumin fusion protein secreted from the yeast can then be collected and purified from the media and tested for its biological activity. For expression in mammalian cell lines a similar procedure is adopted except that the expression cassette used employs a mammalian promoter, leader sequence and terminator (See Example 2). This expression cassette is then excised and inserted into a plasmid suitable for the transfection of mammalian cell lines.

### Example 8

### Preparation of HA-Single Chain Antibody Fusion Proteins

[1001] Single chain antibodies are produced by several methods including but not limited to: selection from phage libraries, cloning of the variable region of a specific antibody by cloning the cDNA of the antibody and using the flanking constant regions as the primer to clone the variable region, or by synthesizing an oligonucleotide corresponding to the variable region of any specific antibody. The cDNA can be tailored at the 5′ and 3′ ends to generate restriction sites, such that oligonucleotide linkers can be used, for cloning of the cDNA into a vector containing the cDNA for HA. This can be at the N or C-terminus with or without the use of a spacer sequence. The cell cDNA is cloned into a vector such as pPPC0005 (FIG. 4), pScCHSA, pScNHSA, or pC4:HSA from which the complete expression cassette is then excised and inserted into the plasmid pSAC35 to allow the expression of the albumin fusion protein in yeast.

[1002] In fusion molecules of the invention, the V_{H} and V_{L} can be linked by one of the following means or a combination thereof: a peptide linker between the C-terminus of the V_{H} and the N-terminus of the V_{L;}; a Kex2p protease cleavage site between the V_{H} and V_{L} such that the two are cleaved apart upon secretion and then self associate; and cystine residues positioned such that the V_{H} and V_{L} can form a disulphide bond between them to link them together (see FIG. 14). An alternative option would be to place the V_{H} at the N-terminus of HA or an HA domain fragment and the V_{L} at the C-terminus of the HA or HA domain fragment.

[1003] The albumin fusion protein secreted from the yeast can then be collected and purified from the media and tested for its activity. For expression in mammalian cell lines a similar procedure is adopted except that the expression cassette used employs a mammalian promoter, leader sequence and terminator (See Example 2). This expression cassette is then excised and inserted into a plasmid suitable for the transfection of mammalian cell lines. The antibody produced in this manner can be purified from media and tested for its binding to its antigen using standard immunochemical methods.

### Example 9

### Preparation of HA-Cell Adhesion Molecule Fusion Proteins

[1004] The cDNA for the cell adhesion molecule of interest can be isolated by a variety of means including but not exclusively, from cDNA libraries, by RT-PCR and by PCR using a series of overlapping synthetic oligonucleotide primers, all using standard methods. The nucleotide sequences for the known cell adhesion molecules are known and available, for instance, in GenBank. The cDNA can be tailored at the 5′ and 3′ ends to generate restriction sites, such that oligonucleotide linkers can be used, for cloning of the cDNA into a vector containing the cDNA for HA. This can be at the N or C-terminus with or without the use of a spacer sequence. The cell adhesion molecule cDNA is cloned into a vector such as pPPC0005 (FIG. 4), pScCHSA, pScNHSA, or pC4:HSA from which the complete expression cassette is then excised and inserted into the plasmid pSAC35 to allow the expression of the albumin fusion protein in yeast. The albumin fusion protein secreted from the yeast can then be collected and purified from the media and tested for its biological activity. For expression in mammalian cell lines a similar procedure is adopted except that the expression cassette used employs a mammalian promoter, leader sequence and terminator (See Example 2). This expression cassette is then excised and inserted into a plasmid suitable for the transfection of mammalian cell lines.

### Example 10

### Preparation of Inhibitory Factors and Peptides as HA Fusion Proteins (such as HA-Antiviral, HA-Antibiotic, HA-Enzyme Inhibitor and HA-Anti-Allergic Proteins)

[1005] The cDNA for the peptide of interest such as an antibiotic peptide can be isolated by a variety of means including but not exclusively, from cDNA libraries, by RT-PCR and by PCR using a series of overlapping synthetic oligonucleotide primers, all using standard methods. The cDNA can be tailored at the 5′ and 3′ ends to generate restriction sites, such that oligonucleotide linkers can be used, for cloning of the cDNA into a vector containing the cDNA for HA. This can be at the N or C-terminus with or without the use of a spacer sequence. The peptide cDNA is cloned into a vector such as pPPC0005 (FIG. 4), pScCHSA, pScNHSA, or pC4:HSA from which the complete expression cassette is then excised and inserted into the plasmid pSAC35 to allow the expression of the albumin fusion protein in yeast. The albumin fusion protein secreted from the yeast can then be collected and purified from the media and tested for its biological activity. For expression in mammalian cell lines a similar procedure is adopted except that the expression cassette used employs a mammalian promoter, leader sequence and terminator (See Example 2). This expression cassette is then excised and inserted into a plasmid suitable for the transfection of mammalian cell lines.

### Example 11

### Preparation of Targeted HA Fusion Proteins

[1006] The cDNA for the protein of interest can be isolated from cDNA library or can be made synthetically using several overlapping oligonucleotides using standard molecular biology methods. The appropriate nucleotides can be engineered in the cDNA to form convenient restriction sites and also allow the attachment of the protein cDNA to albumin cDNA similar to the method described for hGH. Also a targeting protein or peptide cDNA such as single chain antibody or peptides, such as nuclear localization signals, that can direct proteins inside the cells can be fused to the other end of albumin. The protein of interest and the targeting peptide is cloned into a vector such as pPPC0005 (FIG. 4), pScCHSA, pScNHSA, or pC4:HSA which allows the fusion with albumin cDNA. In this manner both N- and C-terminal end of albumin are fused to other proteins. The fused cDNA is then excised from pPPC0005 and is inserted into a plasmid such as pSAC35 to allow the expression of the albumin fusion protein in yeast. All the above procedures can be performed using standard methods in molecular biology. The albumin fusion protein secreted from yeast can be collected and purified from the media and tested for its biological activity and its targeting activity using appropriate biochemical and biological tests.

### Example 12

### Preparation of HA-Enzymes Fusions

[1007] The cDNA for the enzyme of interest can be isolated by a variety of means including but not exclusively, from cDNA libraries, by RT-PCR and by PCR using a series of overlapping synthetic oligonucleotide primers, all using standard methods. The cDNA can be tailored at the 5′ and 3′ ends to generate restriction sites, such that oligonucleotide linkers can be used, for cloning of the cDNA into a vector containing the cDNA for HA. This can be at the N or C-terminus with or without the use of a spacer sequence. The enzyme cDNA is cloned into a vector such as pPPC0005 (FIG. 4), pScCHSA, pScNHSA, or pC4:HSA from which the complete expression cassette is then excised and inserted into the plasmid pSAC35 to allow the expression of the albumin fusion protein in yeast. The albumin fusion protein secreted from the yeast can then be collected and purified from the media and tested for its biological activity. For expression in mammalian cell lines a similar procedure is adopted except that the expression cassette used employs a mammalian promoter, leader sequence and terminator (See Example 2). This expression cassette is then excised and inserted into a plasmid suitable for the transfection of mammalian cell lines.

### Example 13

### Bacterial Expression of an Albumin Fusion Protein

[1008] A polynucleotide encoding an albumin fusion protein of the present invention comprising a bacterial signal sequence is amplified using PCR oligonucleotide primers corresponding to the 5′ and 3′ ends of the DNA sequence, to synthesize insertion fragments. The primers used to amplify the polynucleotide encoding insert should preferably contain restriction sites, such as BamHI and XbaI, at the 5′ end of the primers in order to clone the amplified product into the expression vector. For example, BamHI and XbaI correspond to the restriction enzyme sites on the bacterial expression vector pQE-9. (Qiagen, Inc., Chatsworth, Calif.). This plasmid vector encodes antibiotic resistance (Amp^{r}), a bacterial origin of replication (ori), an IPTG-regulatable promoter/operator (P/O), a ribosome binding site (RBS), a 6-histidine tag (6-His), and restriction enzyme cloning sites.

[1009] The pQE-9 vector is digested with BamHI and XbaI and the amplified fragment is ligated into the pQE-9 vector maintaining the reading frame initiated at the bacterial RBS. The ligation mixture is then used to transform the E. coli strain M15/rep4 (Qiagen, Inc.) which contains multiple copies of the plasmid pREP4, which expresses the lacI repressor and also confers kanamycin resistance (Kan^{r}). Transformants are identified by their ability to grow on LB plates and ampicillin/kanamycin resistant colonies are selected. Plasmid DNA is isolated and confirmed by restriction analysis.

[1010] Clones containing the desired constructs are grown overnight (O/N) in liquid culture in LB media supplemented with both Amp (100 ug/ml) and Kan (25 ug/ml). The O/N culture is used to inoculate a large culture at a ratio of 1:100 to 1:250. The cells are grown to an optical density 600 (O.D.⁶⁰⁰) of between 0.4 and 0.6. IPTG (Isopropyl-B-D-thiogalacto pyranoside) is then added to a final concentration of 1 mM. IPTG induces by inactivating the lacI repressor, clearing the P/O leading to increased gene expression.

[1011] Cells are grown for an extra 3 to 4 hours. Cells are then harvested by centrifugation (20 mins at 6000×g). The cell pellet is solubilized in the chaotropic agent 6 Molar Guanidine HCl or preferably in 8 M urea and concentrations greater than 0.14 M 2-mercaptoethanol by stirring for 3-4 hours at 4° C. (see, e.g., Burton et al., Eur. J. Biochem. 179:379-387 (1989)). The cell debris is removed by centrifugation, and the supernatant containing the polypeptide is loaded onto a nickel-nitrilo-tri-acetic acid (“Ni-NTA”) affinity resin column (available from QIAGEN, Inc., supra). Proteins with a 6×His tag bind to the Ni-NTA resin with high affinity and can be purified in a simple one-step procedure (for details see: The QIAexpressionist (1995) QIAGEN, Inc., supra).

[1012] Briefly, the supernatant is loaded onto the column in 6 M guanidine-HCl, pH 8. The column is first washed with 10 volumes of 6 M guanidine-HCl, pH 8, then washed with 10 volumes of 6 M guanidine-HCl pH 6, and finally the polypeptide is eluted with 6 M guanidine-HCl, pH 5.

[1013] The purified protein is then renatured by dialyzing it against phosphate-buffered saline (PBS) or 50 mM Na-acetate, pH 6 buffer plus 200 mM NaCl. Alternatively, the protein can be successfully refolded while immobilized on the Ni-NTA column. Exemplary conditions are as follows: renature using a linear 6M-1M urea gradient in 500 mM NaCl, 20% glycerol, 20 mM Tris/HCl pH 7.4, containing protease inhibitors. The renaturation should be performed over a period of 1.5 hours or more. After renaturation the proteins are eluted by the addition of 250 mM immidazole. Immidazole is removed by a final dialyzing step against PBS or 50 mM sodium acetate pH 6 buffer plus 200 mM NaCl. The purified protein is stored at 4° C. or frozen at −80 C.

[1014] In addition to the above expression vector, the present invention further includes an expression vector, called pHE4a (ATCC Accession Number 209645, deposited on Feb. 25, 1998) which contains phage operator and promoter elements operatively linked to a polynucleotide encoding an albumin fusion protein of the present invention, called pHE4a. (ATCC Accession Number 209645, deposited on Feb. 25, 1998.) This vector contains: 1) a neomycinphosphotransferase gene as a selection marker, 2) an E. coli origin of replication, 3) a T5 phage promoter sequence, 4) two lac operator sequences, 5) a Shine-Delgarno sequence, and 6) the lactose operon repressor gene (lacIq). The origin of replication (oriC) is derived from pUC19 (LTI, Gaithersburg, Md.). The promoter and operator sequences are made synthetically.

[1015] DNA can be inserted into the pHE4a by restricting the vector with NdeI and XbaI, BamHI, XhoI, or Asp718, running the restricted product on a gel, and isolating the larger fragment (the stuffer fragment should be about 310 base pairs). The DNA insert is generated according to PCR protocols described herein or otherwise known in the art, using PCR primers having restriction sites for NdeI (5′ primer) and XbaI, BamHI, XhoI, or Asp718 (3′ primer). The PCR insert is gel purified and restricted with compatible enzymes. The insert and vector are ligated according to standard protocols.

[1016] The engineered vector may be substituted in the above protocol to express protein in a bacterial system.

### Example 14

### Expression of an Albumin Fusion Protein in Mammalian Cells

[1017] The albumin fusion proteins of the present invention can be expressed in a mammalian cell. A typical mammalian expression vector contains a promoter element, which mediates the initiation of transcription of mRNA, a protein coding sequence, and signals required for the termination of transcription and polyadenylation of the transcript. Additional elements include enhancers, Kozak sequences and intervening sequences flanked by donor and acceptor sites for RNA splicing. Highly efficient transcription is achieved with the early and late promoters from SV40, the long terminal repeats (LTRs) from Retroviruses, e.g., RSV, HTLVI, HIVI and the early promoter of the cytomegalovirus (CMV). However, cellular elements can also be used (e.g., the human actin promoter).

[1018] Suitable expression vectors for use in practicing the present invention include, for example, vectors such as, pSVL and pMSG (Pharmacia, Uppsala, Sweden), pRSVcat (ATCC 37152), pSV2dhfr (ATCC 37146), pBC12MI (ATCC 67109), pCMVSport 2.0, and pCMVSport 3.0. Mammalian host cells that could be used include, but are not limited to, human Hela, 293, H9 and Jurkat cells, mouse NIH3T3 and C127 cells, Cos 1, Cos 7 and CV1, quail QC1-3 cells, mouse L cells and Chinese hamster ovary (CHO) cells.

[1019] Alternatively, the albumin fusion protein can be expressed in stable cell lines containing the polynucleotide encoding the albumin fusion protein integrated into a chromosome. The co-transfection with a selectable marker such as DHFR, gpt, neomycin, or hygromycin allows the identification and isolation of the transfected cells.

[1020] The transfected polynucleotide encoding the fusion protein can also be amplified to express large amounts of the encoded fusion protein. The DHFR (dihydrofolate reductase) marker is useful in developing cell lines that carry several hundred or even several thousand copies of the gene of interest. (See, e.g., Alt et al., J. Biol. Chem. 253:1357-1370 (1978); Hamlin et al., Biochem. et Biophys. Acta, 1097:107-143 (1990); Page et al., Biotechnology 9:64-68 (1991)). Another useful selection marker is the enzyme glutamine synthase (GS) (Murphy et al., Biochem J. 227:277-279 (1991); Bebbington et al., Bio/Technology 10:169-175 (1992). Using these markers, the mammalian cells are grown in selective medium and the cells with the highest resistance are selected. These cell lines contain the amplified gene(s) integrated into a chromosome. Chinese hamster ovary (CHO) and NSO cells are often used for the production of proteins.

[1021] Derivatives of the plasmid pSV2-dhfr (ATCC Accession No. 37146), the expression vectors pC4 (ATCC Accession No. 209646) and pC6 (ATCC Accession No.209647) contain the strong promoter (LTR) of the Rous Sarcoma Virus (Cullen et al., Molecular and Cellular Biology, 438-447 (March, 1985)) plus a fragment of the CMV-enhancer (Boshart et al., Cell 41:521-530 (1985)). Multiple cloning sites, e.g., with the restriction enzyme cleavage sites BamHI, XbaI and Asp718, facilitate the cloning of the gene of interest. The vectors also contain the 3′ intron, the polyadenylation and termination signal of the rat preproinsulin gene, and the mouse DHFR gene under control of the SV40 early promoter.

[1022] Specifically, the plasmid pC6, for example, is digested with appropriate restriction enzymes and then dephosphorylated using calf intestinal phosphates by procedures known in the art. The vector is then isolated from a 1% agarose gel.

[1023] A polynucleotide encoding an albumin fusion protein of the present invention is generated using techniques known in the art and this polynucleotide is amplified using PCR technology known in the art. If a naturally occurring signal sequence is used to produce the fusion protein of the present invention, the vector does not need a second signal peptide. Alternatively, if a naturally occurring signal sequence is not used, the vector can be modified to include a heterologous signal sequence. (See, e.g., International Publication No. WO 96/34891.)

[1024] The amplified fragment encoding the fusion protein of the invention is isolated from a 1% agarose gel using a commercially available kit (“Geneclean,” BIO 101 Inc., La Jolla, Calif.). The fragment then is digested with appropriate restriction enzymes and again purified on a 1% agarose gel.

[1025] The amplified fragment encoding the albumin fusion protein of the invention is then digested with the same restriction enzyme and purified on a 1% agarose gel. The isolated fragment and the dephosphorylated vector are then ligated with T4 DNA ligase. E. coli HB101 or XL-1 Blue cells are then transformed and bacteria are identified that contain the fragment inserted into plasmid pC6 using, for instance, restriction enzyme analysis.

[1026] Chinese hamster ovary cells lacking an active DHFR gene is used for transfection. Five ug of the expression plasmid pC6 or pC4 is cotransfected with 0.5 μg of the plasmid pSVneo using lipofectin (Felgner et al., supra). The plasmid pSV2-neo contains a dominant selectable marker, the neo gene from Tn5 encoding an enzyme that confers resistance to a group of antibiotics including G418. The cells are seeded in alpha minus MEM supplemented with 1 mg/ml G418. After 2 days, the cells are trypsinized and seeded in hybridoma cloning plates (Greiner, Germany) in alpha minus MEM supplemented with 10, 25, or 50 ng/ml of methotrexate plus 1 mg/ml G418. After about 10-14 days single clones are trypsinized and then seeded in 6-well petri dishes or 10 ml flasks using different concentrations of methotrexate (50 nM, 100 nM, 200 nM, 400 nM, 800 nM). Clones growing at the highest concentrations of methotrexate are then transferred to new 6-well plates containing even higher concentrations of methotrexate (1 μM, 2 μM, 5 μM, 10 mM, 20 mM). The same procedure is repeated until clones are obtained which grow at a concentration of 100-200 μM. Expression of the desired fusion protein is analyzed, for instance, by SDS-PAGE and Western blot or by reversed phase HPLC analysis.

### Example 15

### Multifusion Fusions

[1027] The albumin fusion proteins (e.g, containing a Therapeutic protein (or fragment or variant thereof) fused to albumin (or a fragment or variant thereof)) may additionally be fused to other proteins to generate “multifusion proteins”. These multifusion proteins can be used for a variety of applications. For example, fusion of the albumin fusion proteins of the invention to His-tag, HA-tag, protein A, IgG domains, and maltose binding protein facilitates purification. (See e.g, EP A 394,827; Traunecker et al., Nature 331:84-86 (1988)). Nuclear localization signals fused to the polypeptides of the present invention can target the protein to a specific subcellular localization, while covalent heterodimer or homodimers can increase or decrease the activity of an albumin fusion protein. Furthermore, the fusion of additional protein sequences to the albumin fusion proteins of the invention may further increase the solubility and/or stability of the fusion protein. The fusion proteins described above can be made using or routinely modifting techniques known in the art and/or by modifying the following protocol, which outlines the fusion of a polypeptide to an IgG molecule.

[1028] Briefly, the human Fc portion of the IgG molecule can be PCR amplified, using primers that span the 5′ and 3′ ends of the sequence described below. These primers also should have convenient restriction enzyme sites that will facilitate cloning into an expression vector, preferably a mammalian or yeast expression vector.

[1029] For example, if pC4 (ATCC Accession No. 209646) is used, the human Fc portion can be ligated into the BamHI cloning site. Note that the 3′ BamHI site should be destroyed. Next, the vector containing the human Fc portion is re-restricted with BamHI, linearizing the vector, and a polynucleotide encoding an albumin fusion protein of the present invention (generateed and isolated using techniques known in the art), is ligated into this BamHI site. Note that the polynucleotide encoding the fusion protein of the invention is cloned without a stop codon, otherwise a Fc containing fusion protein will not be produced.

[1030] If the naturally occurring signal sequence is used to produce the albumin fusion protein of the present invention, pC4 does not need a second signal peptide. Alternatively, if the naturally occurring signal sequence is not used, the vector can be modified to include a heterologous signal sequence. (See, e.g., International Publication No. WO 96/34891.)

Human IgG Fc region:

(SEQ ID NO: 36)

GGGATCCGGAGCCCAAATCTTCTGACAAAACTCACACATGCCCACCGTGC
CCAGCACCTGAATTCGAGGGTGCACCGTCAGTCTTCCTCTTCCCCCCAAA
ACCCAAGGACACCCTCATGATCTCCCGGACTCCTGAGGTCACATGCGTGG
TGGTGGACGTAAGCCACGAAGACCCTGAGGTCAAGTTCAACTGGTACGTG
GACGGCGTGGAGGTGCATAATGCCAAGACAAAGCCGCGGGAGGAGCAGTA
CAACAGCACGTACCGTGTGGTCAGCGTCCTCACCGTCCTGCACCAGGACT
GGCTGAATGGCAAGGAGTACAAGTGCAAGGTCTCCAACAAAGCCCTCCCA
ACCCCCATCGAGAAAACCATCTCCAAAGCCAAAGGGCAGCCCCGAGAACC
ACAGGTGTACACCCTGCCCCCATCCCGGGATGAGCTGACCAAGAACCAGG
TCAGCCTGACCTGCCTGGTCAAAGGCTTCTATCCAAGCGACATCGCCGTG
GAGTGGGAGAGCAATGGGCAGCCGGAGAACAACTACAAGACCACGCCTCC
CGTGCTGGACTCCGACGGCTCCTTCTTCCTCTACAGCAAGCTCACCGTGG
ACAAGAGCAGGTGGCAGCAGGGGAACGTCTTCTCATGCTCCGTGATGCAT
GAGGCTCTGCACAACCACTACACGCAGAAGAGCCTCTCCCTGTCTCCGGG
TAAATGAGTGCGACGGCCGCGACTCTAGAGGAT

### Example 16

### Production of an Antibody from an Albumin Fusion Protein

[1031] a) Hybridoma Technology

[1032] Antibodies that bind the albumin fusion proteins of the present invention and portions of the albumin fusion proteins of the present invention (e.g., the Therapeutic protein portion or albumin portion of the fusion protein) can be prepared by a variety of methods. (See, Current Protocols, Chapter 2.) As one example of such methods, a preparation of an albumin fusion protein of the invention or a portion of an albumin fusion protein of the invention is prepared and purified to render it substantially free of natural contaminants. Such a preparation is then introduced into an animal in order to produce polyclonal antisera of greater specific activity.

[1033] Monoclonal antibodies specific for an albumin fusion protein of the invention, or a portion of an albumin fusion protein of the invention, are prepared using hybridoma technology (Kohler et al., Nature 256:495 (1975); Kohler et al., Eur. J. Immunol. 6:511 (1976); Kohler et al., Eur. J. Immunol. 6:292 (1976); Hammerling et al., in: Monoclonal Antibodies and T-Cell Hybridomas, Elsevier, N.Y., pp. 563-681 (1981)). In general, an animal (preferably a mouse) is immunized with an albumin fusion protein of the invention, or a portion of an albumin fusion protein of the invention. The splenocytes of such mice are extracted and fused with a suitable myeloma cell line. Any suitable myeloma cell line may be employed in accordance with the present invention; however, it is preferable to employ the parent myeloma cell line (SP20), available from the ATCC. After fusion, the resulting hybridoma cells are selectively maintained in HAT medium, and then cloned by limiting dilution as described by Wands et al. (Gastroenterology 80:225-232 (1981)). The hybridoma cells obtained through such a selection are then assayed to identify clones which secrete antibodies capable of binding an albumin fusion protein of the invention, or a portion of an albumin fusion protein of the invention.

[1034] Alternatively, additional antibodies capable of binding to an albumin fusion protein of the invention, or a portion of an albumin fusion protein of the invention can be produced in a two-step procedure using anti-idiotypic antibodies. Such a method makes use of the fact that antibodies are themselves antigens, and therefore, it is possible to obtain an antibody which binds to a second antibody. In accordance with this method, protein specific antibodies are used to immunize an animal, preferably a mouse. The splenocytes of such an animal are then used to produce hybridoma cells, and the hybridoma cells are screened to identify clones which produce an antibody whose ability to bind to the an albumin fusion protein of the invention (or portion of an albumin fusion protein of the invention)-specific antibody can be blocked by the fusion protein of the invention, or a portion of an albumin fusion protein of the invention. Such antibodies comprise anti-idiotypic antibodies to the fusion protein of the invention (or portion of an albumin fusion protein of the invention)-specific antibody and are used to immunize an animal to induce formation of further fusion protein of the invention (or portion of an albumin fusion protein of the invention)-specific antibodies.

[1035] For in vivo use of antibodies in humans, an antibody is “humanized”. Such antibodies can be produced using genetic constructs derived from hybridoma cells producing the monoclonal antibodies described above. Methods for producing chimeric and humanized antibodies are known in the art and are discussed herein. (See, for review, Morrison, Science 229:1202 (1985); Oi et al., BioTechniques 4:214 (1986); Cabilly et al., U.S. Pat. No. 4,816,567; Taniguchi et al., EP 171496; Morrison et al., EP 173494; Neuberger et al., WO 8601533; Robinson et al., International Publication No. WO 8702671; Boulianne et al., Nature 312:643 (1984); Neuberger et al., Nature 314:268 (1985)).

[1036] b) Isolation Of Antibody Fragments Directed Against an Albumin Fusion Protein of the Invention, or a Portion of an Albumin Fusion Protein of the Invention From a Library of scFvs

[1037] Naturally occurring V-genes isolated from human PBLs are constructed into a library of antibody fragments which contain reactivities against an albumin fusion protein of the invention, or a portion of an albumin fusion protein of the invention, to which the donor may or may not have been exposed (see e.g., U.S. Pat. No. 5,885,793 incorporated herein by reference in its entirety).

[1038] Rescue of the Library. A library of scFvs is constructed from the RNA of human PBLs as described in International Publication No. WO 92/01047. To rescue phage displaying antibody fragments, approximately 109 E. coli harboring the phagemid are used to inoculate 50 ml of 2×TY containing 1% glucose and 100 μg/ml of ampicillin (2×TY-AMP-GLU) and grown to an O.D. of 0.8 with shaking. Five ml of this culture is used to inoculate 50 ml of 2×TY-AMP-GLU, 2×10⁸ TU of delta gene 3 helper (M13 delta gene III, see International Publication No. WO 92/01047) are added and the culture incubated at 37° C. for 45 minutes without shaking and then at 37° C. for 45 minutes with shaking. The culture is centrifuged at 4000 r.p.m. for 10 min. and the pellet resuspended in 2 liters of 2×TY containing 100 μg/ml ampicillin and 50 ug/ml kanamycin and grown overnight. Phage are prepared as described in International Publication No. WO 92/01047.

[1039] M13 delta gene III is prepared as follows: M13 delta gene III helper phage does not encode gene III protein, hence the phage(mid) displaying antibody fragments have a greater avidity of binding to antigen. Infectious M13 delta gene III particles are made by growing the helper phage in cells harboring a pUC19 derivative supplying the wild type gene III protein during phage morphogenesis. The culture is incubated for 1 hour at 37° C. without shaking and then for a further hour at 37° C. with shaking. Cells are spun down (IEC-Centra 8,400 r.p.m. for 10 min), resuspended in 300 ml 2×TY broth containing 100 μg ampicillin/ml and 25 μg kanamycin/ml (2×TY-AMP-KAN) and grown overnight, shaking at 37° C. Phage particles are purified and concentrated from the culture medium by two PEG-precipitations (Sambrook et al., 1990), resuspended in 2 ml PBS and passed through a 0.45 μm filter (Minisart NML; Sartorius) to give a final concentration of approximately 10¹³ transducing units/ml (ampicillin-resistant clones).

[1040] Panning of the Library. Immunotubes (Nunc) are coated overnight in PBS with 4 ml of either 100 μg/ml or 10 μg/ml of an albumin fusion protein of the invention, or a portion of an albumin fusion protein of the invention. Tubes are blocked with 2% Marvel-PBS for 2 hours at 37° C. and then washed 3 times in PBS. Approximately 10¹³ TU of phage is applied to the tube and incubated for 30 minutes at room temperature tumbling on an over and under turntable and then left to stand for another 1.5 hours. Tubes are washed 10 times with PBS 0.1% Tween-20 and 10 times with PBS. Phage are eluted by adding 1 ml of 100 mM triethylamine and rotating 15 minutes on an under and over turntable after which the solution is immediately neutralized with 0.5 ml of 1.0M Tris-HCl, pH 7.4. Phage are then used to infect 10 ml of mid-log E. coli TG1 by incubating eluted phage with bacteria for 30 minutes at 37° C. The E. coli are then plated on TYE plates containing 1% glucose and 100 μg/ml ampicillin. The resulting bacterial library is then rescued with delta gene 3 helper phage as described above to prepare phage for a subsequent round of selection. This process is then repeated for a total of 4 rounds of affinity purification with tube-washing increased to 20 times with PBS, 0.1% Tween-20 and 20 times with PBS for rounds 3 and 4.

[1041] Characterization of Binders. Eluted phage from the 3rd and 4th rounds of selection are used to infect E. coli HB 2151 and soluble scFv is produced (Marks, et al., 1991) from single colonies for assay. ELISAs are performed with microtitre plates coated with either 10 pg/ml of an albumin fusion protein of the invention, or a portion of an albumin fusion protein of the invention, in 50 mM bicarbonate pH 9.6. Clones positive in ELISA are further characterized by PCR fingerprinting (see, e.g., International Publication No. WO 92/01047) and then by sequencing. These ELISA positive clones may also be further characterized by techniques known in the art, such as, for example, epitope mapping, binding affinity, receptor signal transduction, ability to block or competitively inhibit antibody/antigen binding, and competitive agonistic or antagonistic activity.

### Example 17

### Method of Treatment Using Gene Therapy-Ex Vivo

[1042] One method of gene therapy transplants fibroblasts, which are capable of expressing an albumin fusion protein of the present invention, onto a patient. Generally, fibroblasts are obtained from a subject by skin biopsy. The resulting tissue is placed in tissue-culture medium and separated into small pieces. Small chunks of the tissue are placed on a wet surface of a tissue culture flask, approximately ten pieces are placed in each flask. The flask is turned upside down, closed tight and left at room temperature over night. After 24 hours at room temperature, the flask is inverted and the chunks of tissue remain fixed to the bottom of the flask and fresh media (e.g., Ham's F12 media, with 10% FBS, penicillin and streptomycin) is added. The flasks are then incubated at 37 degree C. for approximately one week.

[1043] At this time, fresh media is added and subsequently changed every several days. After an additional two weeks in culture, a monolayer of fibroblasts emerge. The monolayer is trypsinized and scaled into larger flasks. pMV-7 (Kirschmeier, P. T. et al., DNA, 7:219-25 (1988)), flanked by the long terminal repeats of the Moloney murine sarcoma virus, is digested with EcoRI and HindIII and subsequently treated with calf intestinal phosphatase. The linear vector is fractionated on agarose gel and purified, using glass beads.

[1044] Polynucleotides encoding an albumin fusion protein of the invention can be generated using techniques known in the art amplified using PCR primers which correspond to the 5′ and 3′ end sequences and optionally having appropriate restriction sites and initiation/stop codons, if necessary. Preferably, the 5′ primer contains an EcoRI site and the 3′ primer includes a HindIII site. Equal quantities of the Moloney murine sarcoma virus linear backbone and the amplified EcoRI and HindIII fragment are added together, in the presence of T4 DNA ligase. The resulting mixture is maintained under conditions appropriate for ligation of the two fragments. The ligation mixture is then used to transform bacteria HB101, which are then plated onto agar containing kanamycin for the purpose of confirming that the vector has the gene of interest properly inserted.

[1045] The amphotropic pA317 or GP+am12 packaging cells are grown in tissue culture to confluent density in Dulbecco's Modified Eagles Medium (DMEM) with 10% calf serum (CS), penicillin and streptomycin. The MSV vector containing the gene is then added to the media and the packaging cells transduced with the vector. The packaging cells now produce infectious viral particles containing the gene (the packaging cells are now referred to as producer cells).

[1046] Fresh media is added to the transduced producer cells, and subsequently, the media is harvested from a 10 cm plate of confluent producer cells. The spent media, containing the infectious viral particles, is filtered through a millipore filter to remove detached producer cells and this media is then used to infect fibroblast cells. Media is removed from a sub-confluent plate of fibroblasts and quickly replaced with the media from the producer cells. This media is removed and replaced with fresh media. If the titer of virus is high, then virtually all fibroblasts will be infected and no selection is required. If the titer is very low, then it is necessary to use a retroviral vector that has a selectable marker, such as neo or his. Once the fibroblasts have been efficiently infected, the fibroblasts are analyzed to determine whether the albumin fusion protein is produced.

[1047] The engineered fibroblasts are then transplanted onto the host, either alone or after having been grown to confluence on cytodex 3 microcarrier beads.

### Example 18

### Method of Treatment Using Gene Therapy—In Vivo

[1048] Another aspect of the present invention is using in vivo gene therapy methods to treat disorders, diseases and conditions. The gene therapy method relates to the introduction of naked nucleic acid (DNA, RNA, and antisense DNA or RNA) sequences encoding an albumin fusion protein of the invention into an animal. Polynucleotides encoding albumin fusion proteins of the present invention may be operatively linked to (i.e., associated with) a promoter or any other genetic elements necessary for the expression of the polypeptide by the target tissue. Such gene therapy and delivery techniques and methods are known in the art, see, for example, WO90/11092, WO98/11779; U.S. Pat. No. 5,693,622, 5705151, 5580859; Tabata et al., Cardiovasc. Res. 35(3):470-479 (1997); Chao et al., Pharmacol. Res. 35(6):517-522 (1997); Wolff, Neuromuscul. Disord. 7(5):314-318 (1997); Schwartz et al., Gene Ther. 3(5):405-411 (1996); Tsurumi et al., Circulation 94(12):3281-3290 (1996) (incorporated herein by reference).

[1049] The polynucleotide constructs may be delivered by any method that delivers injectable materials to the cells of an animal, such as, injection into the interstitial space of tissues (heart, muscle, skin, lung, liver, intestine and the like). The polynucleotide constructs can be delivered in a pharmaceutically acceptable liquid or aqueous carrier.

[1050] The term “naked” polynucleotide, DNA or RNA, refers to sequences that are free from any delivery vehicle that acts to assist, promote, or facilitate entry into the cell, including viral sequences, viral particles, liposome formulations, lipofectin or precipitating agents and the like. However, polynucleotides encoding albumin fusion proteins of the present invention may also be delivered in liposome formulations (such as those taught in Felgner P. L. et al. (1995) Ann. NY Acad. Sci. 772:126-139 and Abdallah B. et al. (1995) Biol. Cell 85(1):1-7) which can be prepared by methods well known to those skilled in the art.

[1051] The polynucleotide vector constructs used in the gene therapy method are preferably constructs that will not integrate into the host genome nor will they contain sequences that allow for replication. Any strong promoter known to those skilled in the art can be used for driving the expression of DNA. Unlike other gene therapy techniques, one major advantage of introducing naked nucleic acid sequences into target cells is the transitory nature of the polynucleotide synthesis in the cells. Studies have shown that non-replicating DNA sequences can be introduced into cells to provide production of the desired polypeptide for periods of up to six months.

[1052] The polynucleotide construct can be delivered to the interstitial space of tissues within an animal, including muscle, skin, brain, lung, liver, spleen, bone marrow, thymus, heart, lymph, blood, bone, cartilage, pancreas, kidney, gall bladder, stomach, intestine, testis, ovary, uterus, rectum, nervous system, eye, gland, and connective tissue. Interstitial space of the tissues comprises the intercellular fluid, mucopolysaccharide matrix among the reticular fibers of organ tissues, elastic fibers in the walls of vessels or chambers, collagen fibers of fibrous tissues, or that same matrix within connective tissue ensheathing muscle cells or in the lacunae of bone. It is similarly the space occupied by the plasma of the circulation and the lymph fluid of the lymphatic channels. Delivery to the interstitial space of muscle tissue is preferred for the reasons discussed below. They may be conveniently delivered by injection into the tissues comprising these cells. They are preferably delivered to and expressed in persistent, non-dividing cells which are differentiated, although delivery and expression may be achieved in non-differentiated or less completely differentiated cells, such as, for example, stem cells of blood or skin fibroblasts. In vivo muscle cells are particularly competent in their ability to take up and express polynucleotides.

[1053] For the naked polynucleotide injection, an effective dosage amount of DNA or RNA will be in the range of from about 0.05 g/kg body weight to about 50 mg/kg body weight. Preferably the dosage will be from about 0.005 mg/kg to about 20 mg/kg and more preferably from about 0.05 mg/kg to about 5 mg/kg. Of course, as the artisan of ordinary skill will appreciate, this dosage will vary according to the tissue site of injection. The appropriate and effective dosage of nucleic acid sequence can readily be determined by those of ordinary skill in the art and may depend on the condition being treated and the route of administration. The preferred route of administration is by the parenteral route of injection into the interstitial space of tissues. However, other parenteral routes may also be used, such as, inhalation of an aerosol formulation particularly for delivery to lungs or bronchial tissues, throat or mucous membranes of the nose. In addition, naked polynucleotide constructs can be delivered to arteries during angioplasty by the catheter used in the procedure.

[1054] The dose response effects of injected polynucleotide in muscle in vivo is determined as follows. Suitable template DNA for production of mRNA coding for polypeptide of the present invention is prepared in accordance with a standard recombinant DNA methodology. The template DNA, which may be either circular or linear, is either used as naked DNA or complexed with liposomes. The quadriceps muscles of mice are then injected with various amounts of the template DNA.

[1055] Five to six week old female and male Balb/C mice are anesthetized by intraperitoneal injection with 0.3 ml of 2.5% Avertin. A 1.5 cm incision is made on the anterior thigh, and the quadriceps muscle is directly visualized. The template DNA is injected in 0.1 ml of carrier in a 1 cc syringe through a 27 gauge needle over one minute, approximately 0.5 cm from the distal insertion site of the muscle into the knee and about 0.2 cm deep. A suture is placed over the injection site for future localization, and the skin is closed with stainless steel clips.

[1056] After an appropriate incubation time (e.g., 7 days) muscle extracts are prepared by excising the entire quadriceps. Every fifth 15 um cross-section of the individual quadriceps muscles is histochemically stained for protein expression. A time course for fusion protein expression may be done in a similar fashion except that quadriceps from different mice are harvested at different times. Persistence of DNA in muscle following injection may be determined by Southern blot analysis after preparing total cellular DNA and HIRT supernatants from injected and control mice. The results of the above experimentation in mice can be used to extrapolate proper dosages and other treatment parameters in humans and other animals using naked DNA.

### Example 19

### Transgenic Animals

[1057] The albumin fusion proteins of the invention can also be expressed in transgenic animals. Animals of any species, including, but not limited to, mice, rats, rabbits, hamsters, guinea pigs, pigs, micro-pigs, goats, sheep, cows and non-human primates, e.g., baboons, monkeys, and chimpanzees may be used to generate transgenic animals. In a specific embodiment, techniques described herein or otherwise known in the art, are used to express fusion proteins of the invention in humans, as part of a gene therapy protocol.

[1058] Any technique known in the art may be used to introduce the polynucleotides encoding the albumin fusion proteins of the invention into animals to produce the founder lines of transgenic animals. Such techniques include, but are not limited to, pronuclear microinjection (Paterson et al., Appl. Microbiol. Biotechnol. 40:691-698 (1994); Carver et al., Biotechnology (NY) 11:1263-1270 (1993); Wright et al., Biotechnology (NY) 9:830-834 (1991); and Hoppe et al., U.S. Pat. No. 4,873,191 (1989)); retrovirus mediated gene transfer into germ lines (Van der Putten et al., Proc. Natl. Acad. Sci., USA 82:6148-6152 (1985)), blastocysts or embryos; gene targeting in embryonic stem cells (Thompson et al., Cell 56:313-321 (1989)); electroporation of cells or embryos (Lo, 1983, Mol Cell. Biol. 3:1803-1814 (1983)); introduction of the polynucleotides of the invention using a gene gun (see, e.g., Ulmer et al., Science 259:1745 (1993); introducing nucleic acid constructs into embryonic pleuripotent stem cells and transferring the stem cells back into the blastocyst; and sperm-mediated gene transfer (Lavitrano et al., Cell 57:717-723 (1989); etc. For a review of such techniques, see Gordon, “Transgenic Animals,” Intl. Rev. Cytol. 115:171-229 (1989), which is incorporated by reference herein in its entirety.

[1059] Any technique known in the art may be used to produce transgenic clones containing polynucleotides encoding albumin fusion proteins of the invention, for example, nuclear transfer into enucleated oocytes of nuclei from cultured embryonic, fetal, or adult cells induced to quiescence (Campell et al., Nature 380:64-66 (1996); Wilmut et al., Nature 385:810-813 (1997)).

[1060] The present invention provides for transgenic animals that carry the polynucleotides encoding the albumin fusion proteins of the invention in all their cells, as well as animals which carry these polynucleotides in some, but not all their cells, i.e., mosaic animals or chimeric. The transgene may be integrated as a single transgene or as multiple copies such as in concatamers, e.g., head-to-head tandems or head-to-tail tandems. The transgene may also be selectively introduced into and activated in a particular cell type by following, for example, the teaching of Lasko et al. (Lasko et al., Proc. Natl. Acad. Sci. USA 89:6232-6236 (1992)). The regulatory sequences required for such a cell-type specific activation will depend upon the particular cell type of interest, and will be apparent to those of skill in the art. When it is desired that the polynucleotide encoding the fusion protein of the invention be integrated into the chromosomal site of the endogenous gene corresponding to the Therapeutic protein portion or ablumin portion of the fusion protein of the invention, gene targeting is preferred. Briefly, when such a technique is to be utilized, vectors containing some nucleotide sequences homologous to the endogenous gene are designed for the purpose of integrating, via homologous recombination with chromosomal sequences, into and disrupting the function of the nucleotide sequence of the endogenous gene. The transgene may also be selectively introduced into a particular cell type, thus inactivating the endogenous gene in only that cell type, by following, for example, the teaching of Gu et al. (Gu et al., Science 265:103-106 (1994)). The regulatory sequences required for such a cell-type specific inactivation will depend upon the particular cell type of interest, and will be apparent to those of skill in the art.

[1061] Once transgenic animals have been generated, the expression of the recombinant gene may be assayed utilizing standard techniques. Initial screening may be accomplished by Southern blot analysis or PCR techniques to analyze animal tissues to verify that integration of the polynucleotide encoding the fsuion protien of the invention has taken place. The level of mRNA expression of the polynucleotide encoding the fusion protein of the invention in the tissues of the transgenic animals may also be assessed using techniques which include, but are not limited to, Northern blot analysis of tissue samples obtained from the animal, in situ hybridization analysis, and reverse transcriptase-PCR (rt-PCR). Samples of fusion protein-expressing tissue may also be evaluated immunocytochemically or immunohistochemically using antibodies specific for the fusion protein.

[1062] Once the founder animals are produced, they may be bred, inbred, outbred, or crossbred to produce colonies of the particular animal. Examples of such breeding strategies include, but are not limited to: outbreeding of founder animals with more than one integration site in order to establish separate lines; inbreeding of separate lines in order to produce compound transgenics that express the transgene at higher levels because of the effects of additive expression of each transgene; crossing of heterozygous transgenic animals to produce animals homozygous for a given integration site in order to both augment expression and eliminate the need for screening of animals by DNA analysis; crossing of separate homozygous lines to produce compound heterozygous or homozygous lines; and breeding to place the transgene (i.e., polynucleotide encoding an albumin fusion protein of the invention) on a distinct background that is appropriate for an experimental model of interest.

[1063] Transgenic animals of the invention have uses which include, but are not limited to, animal model systems useful in elaborating the biological function of fusion proteins of the invention and the Therapeutic protein and/or albumin component of the fusion protein of the invention, studying conditions and/or disorders associated with aberrant expression, and in screening for compounds effective in ameliorating such conditions and/or disorders.

### Example 20

### Assays Detecting Stimulation or Inhibition of B Cell Proliferation and Differentiation

[1064] Generation of functional humoral immune responses requires both soluble and cognate signaling between B-lineage cells and their microenvironment. Signals may impart a positive stimulus that allows a B-lineage cell to continue its programmed development, or a negative stimulus that instructs the cell to arrest its current developmental pathway. To date, numerous stimulatory and inhibitory signals have been found to influence B cell responsiveness including IL-2, IL-4, IL-5, IL-6, IL-7, IL10, IL-13, IL-14 and IL-15. Interestingly, these signals are by themselves weak effectors but can, in combination with various co-stimulatory proteins, induce activation, proliferation, differentiation, homing, tolerance and death among B cell populations. One of the best studied classes of B-cell co-stimulatory proteins is the TNF-superfamily. Within this family CD40, CD27, and CD30 along with their respective ligands CD154, CD70, and CD153 have been found to regulate a variety of immune responses. Assays which allow for the detection and/or observation of the proliferation and differentiation of these B-cell populations and their precursors are valuable tools in determining the effects various proteins may have on these B-cell populations in terms of proliferation and differentiation. Listed below are two assays designed to allow for the detection of the differentiation, proliferation, or inhibition of B-cell populations and their precursors.

[1065] In Vitro Assay—Albumin fusion proteins of the invention (including fusion proteins containing fragments or variants of Therapeutic proteins and/or albumin or fragments or variants of albumin) can be assessed for its ability to induce activation, proliferation, differentiation or inhibition and/or death in B-cell populations and their precursors. The activity of an albumin fusion protein of the invention on purified human tonsillar B cells, measured qualitatively over the dose range from 0.1 to 10,000 ng/mL, is assessed in a standard B-lymphocyte co-stimulation assay in which purified tonsillar B cells are cultured in the presence of either formalin-fixed Staphylococcus aureus Cowan I (SAC) or immobilized anti-human IgM antibody as the priming agent. Second signals such as IL-2 and IL-15 synergize with SAC and IgM crosslinking to elicit B cell proliferation as measured by tritiated-thymidine incorporation. Novel synergizing agents can be readily identified using this assay. The assay involves isolating human tonsillar B cells by magnetic bead (MACS) depletion of CD3-positive cells. The resulting cell population is greater than 95% B cells as assessed by expression of CD45R(B220).

[1066] Various dilutions of each sample are placed into individual wells of a 96-well plate to which are added 10⁵ B-cells suspended in culture medium (RPMI 1640 containing 10% FBS, 5×10⁻⁵M 2ME, 100U/ml penicillin, 10 ug/ml streptomycin, and 10⁻⁵ dilution of SAC) in a total volume of 150 ul. Proliferation or inhibition is quantitated by a 20 h pulse (1 uCi/well) with 3H-thymidine (6.7 Ci/mM) beginning 72 h post factor addition. The positive and negative controls are IL2 and medium respectively.

[1067] In vivo Assay—BALB/c mice are injected (i.p.) twice per day with buffer only, or 2 mg/Kg of an albumin fusion protein of the invention (including fusion proteins containing fragments or variants of Therapeutic proteins and/or albumin or fragments or variants of albumin). Mice receive this treatment for 4 consecutive days, at which time they are sacrificed and various tissues and serum collected for analyses. Comparison of H&E sections from normal spleens and spleens treated with the albumin fusion protein of the invention identify the results of the activity of the fusion protein on spleen cells, such as the diffusion of peri-arterial lymphatic sheaths, and/or significant increases in the nucleated cellularity of the red pulp regions, which may indicate the activation of the differentiation and proliferation of B-cell populations. Immunohistochemical studies using a B cell marker, anti-CD45R(B220), are used to determine whether any physiological changes to splenic cells, such as splenic disorganization, are due to increased B-cell representation within loosely defined B-cell zones that infiltrate established T-cell regions.

[1068] Flow cytometric analyses of the spleens from mice treated with the albumin fusion protein is used to indicate whether the albumin fusion protein specifically increases the proportion of ThB+, CD45R(B220)dull B cells over that which is observed in control mice.

[1069] Likewise, a predicted consequence of increased mature B-cell representation in vivo is a relative increase in serum Ig titers. Accordingly, serum IgM and IgA levels are compared between buffer and fusion protein treated mice.

[1070] The studies described in this example tested activity of fusion proteins of the invention. However, one skilled in the art could easily modify the exemplified studies to test the activity of fusion proteins and polynucleotides of the invention (e.g., gene therapy).

### Example 21

### T Cell Proliferation Assay

[1071] A CD3-induced proliferation assay is performed on PBMCs and is measured by the uptake of ³H-thymidine. The assay is performed as follows. Ninety-six well plates are coated with 100 μL/well of mAb to CD3 (HIT3a, Pharmingen) or isotype-matched control mAb (B33.1) overnight at 4 degrees C. (1 μg/ml in 0.05M bicarbonate buffer, pH 9.5), then washed three times with PBS. PBMC are isolated by F/H gradient centrifugation from human peripheral blood and added to quadruplicate wells (5×10⁴/well) of mAb coated plates in RPMI containing 10% FCS and P/S in the presence of varying concentrations of an albumin fusion protein of the invention (including fusion proteins containing fragments or variants of Therapeutic proteins and/or albumin or fragments or variants of albumin) (total volume 200 ul). Relevant protein buffer and medium alone are controls. After 48 hr. culture at 37 degrees C., plates are spun for 2 min. at 1000 rpm and 100 μl of supernatant is removed and stored −20 degrees C. for measurement of IL-2 (or other cytokines) if effect on proliferation is observed. Wells are supplemented with 100 ul of medium containing 0.5 uCi of ³H-thymidine and cultured at 37 degrees C. for 18-24 hr. Wells are harvested and incorporation of ³H-thymidine used as a measure of proliferation. Anti-CD3 alone is the positive control for proliferation. IL-2 (100 U/ml) is also used as a control which enhances proliferation. Control antibody which does not induce proliferation of T cells is used as the negative control for the effects of fusion proteins of the invention.

[1072] The studies described in this example tested activity of fusion proteins of the invention. However, one skilled in the art could easily modify the exemplified studies to test the activity of fusion proteins or polynucleotides of the invention (e.g., gene therapy).

### Example 22

### Effect of Fusion Proteins of the Invention on the Expression of MHC Class II, Costimulatory and Adhesion Molecules and Cell Differentiation of Monocytes and Monocyte-Derived Human Dendritic Cells

[1073] Dendritic cells are generated by the expansion of proliferating precursors found in the peripheral blood: adherent PBMC or elutriated monocytic fractions are cultured for 7-10 days with GM-CSF (50 ng/ml) and IL-4 (20 ng/ml). These dendritic cells have the characteristic phenotype of immature cells (expression of CD1, CD80, CD86, CD40 and MHC class II antigens). Treatment with activating factors, such as TNF-α, causes a rapid change in surface phenotype (increased expression of MHC class I and II, costimulatory and adhesion molecules, downregulation of FCγRII, upregulation of CD83). These changes correlate with increased antigen-presenting capacity and with functional maturation of the dendritic cells.

[1074] FACS analysis of surface antigens is performed as follows. Cells are treated 1-3 days with increasing concentrations of an albumin fusion protein of the invention or LPS (positive control), washed with PBS containing 1% BSA and 0.02 mM sodium azide, and then incubated with 1:20 dilution of appropriate FITC- or PE-labeled monoclonal antibodies for 30 minutes at 4 degrees C. After an additional wash, the labeled cells are analyzed by flow cytometry on a FACScan (Becton Dickinson).

[1075] Effect on the production of cytokines. Cytokines generated by dendritic cells, in particular IL-12, are important in the initiation of T-cell dependent immune responses. IL-12 strongly influences the development of Th1 helper T-cell immune response, and induces cytotoxic T and NK cell function. An ELISA is used to measure the IL-12 release as follows. Dendritic cells (10⁶/ml) are treated with increasing concentrations of an albumin fusion protein of the invention for 24 hours. LPS (100 ng/ml) is added to the cell culture as positive control. Supernatants from the cell cultures are then collected and analyzed for IL-12 content using commercial ELISA kit (e.g., R & D Systems (Minneapolis, Minn.)). The standard protocols provided with the kits are used.

[1076] Effect on the expression of MHC Class II, costimulatory and adhesion molecules. Three major families of cell surface antigens can be identified on monocytes: adhesion molecules, molecules involved in antigen presentation, and Fc receptor. Modulation of the expression of MHC class II antigens and other costimulatory molecules, such as B7 and ICAM-1, may result in changes in the antigen presenting capacity of monocytes and ability to induce T cell activation. Increased expression of Fc receptors may correlate with improved monocyte cytotoxic activity, cytokine release and phagocytosis.

[1077] FACS analysis is used to examine the surface antigens as follows. Monocytes are treated 1-5 days with increasing concentrations of an albumin fusion protein of the invention or LPS (positive control), washed with PBS containing 1% BSA and 0.02 mM sodium azide, and then incubated with 1:20 dilution of appropriate FITC- or PE-labeled monoclonal antibodies for 30 minutes at 4 degrees C. After an additional wash, the labeled cells are analyzed by flow cytometry on a FACScan (Becton Dickinson).

[1078] Monocyte activation and/or increased survival. Assays for molecules that activate (or alternatively, inactivate) monocytes and/or increase monocyte survival (or alternatively, decrease monocyte survival) are known in the art and may routinely be applied to determine whether a molecule of the invention functions as an inhibitor or activator of monocytes. Albumin fusion proteins of the invention can be screened using the three assays described below. For each of these assays, Peripheral blood mononuclear cells (PBMC) are purified from single donor leukopacks (American Red Cross, Baltimore, Md.) by centrifugation through a Histopaque gradient (Sigma). Monocytes are isolated from PBMC by counterflow centrifugal elutriation.

[1079] Monocyte Survival Assay. Human peripheral blood monocytes progressively lose viability when cultured in absence of serum or other stimuli. Their death results from internally regulated processes (apoptosis). Addition to the culture of activating factors, such as TNF-alpha dramatically improves cell survival and prevents DNA fragmentation. Propidium iodide (PI) staining is used to measure apoptosis as follows. Monocytes are cultured for 48 hours in polypropylene tubes in serum-free medium (positive control), in the presence of 100 ng/ml TNF-alpha (negative control), and in the presence of varying concentrations of the fusion protein to be tested. Cells are suspended at a concentration of 2×10⁶/ml in PBS containing PI at a final concentration of 5 μg/ml, and then incubated at room temperature for 5 minutes before FACScan analysis. PI uptake has been demonstrated to correlate with DNA fragmentation in this experimental paradigm.

[1080] Effect on cytokine release. An important function of monocytes/macrophages is their regulatory activity on other cellular populations of the immune system through the release of cytokines after stimulation. An ELISA to measure cytokine release is performed as follows. Human monocytes are incubated at a density of 5×10⁵ cells/ml with increasing concentrations of an albumin fusion protein of the invention and under the same conditions, but in the absence of the fusion protein. For IL-12 production, the cells are primed overnight with IFN (100 U/ml) in the presence of the fusion protein. LPS (10 ng/ml) is then added. Conditioned media are collected after 24 h and kept frozen until use. Measurement of TNF-alpha, IL-10, MCP-1 and IL-8 is then performed using a commercially available ELISA kit (e.g., R & D Systems (Minneapolis, Minn.)) and applying the standard protocols provided with the kit.

[1081] Oxidative burst. Purified monocytes are plated in 96-w plate at 2-1×10⁵ cell/well. Increasing concentrations of an albumin fusion protein of the invention are added to the wells in a total volume of 0.2 ml culture medium (RPMI 1640+10% FCS, glutamine and antibiotics). After 3 days incubation, the plates are centrifuged and the medium is removed from the wells. To the macrophage monolayers, 0.2 ml per well of phenol red solution (140 mM NaCl, 10 mM potassium phosphate buffer pH 7.0, 5.5 mM dextrose, 0.56 mM phenol red and 19 U/ml of HRPO) is added, together with the stimulant (200 nM PMA). The plates are incubated at 37° C. for 2 hours and the reaction is stopped by adding 20 μl 1N NaOH per well. The absorbance is read at 610 nm. To calculate the amount of H₂O₂ produced by the macrophages, a standard curve of a H₂O₂ solution of known molarity is performed for each experiment.

[1082] The studies described in this example tested activity of fusion proteins of the invention. However, one skilled in the art could easily modify the exemplified studies to test the activity of fusion proteins or polynucleotides of the invention (e.g., gene therapy).

### Example 23

### Biological Effects of Fusion Proteins of the Invention

[1083] Astrocyte and Neuronal Assays

[1084] Albumin fusion proteins of the invention can be tested for activity in promoting the survival, neurite outgrowth, or phenotypic differentiation of cortical neuronal cells and for inducing the proliferation of glial fibrillary acidic protein immunopositive cells, astrocytes. The selection of cortical cells for the bioassay is based on the prevalent expression of FGF-1 and FGF-2 in cortical structures and on the previously reported enhancement of cortical neuronal survival resulting from FGF-2 treatment. A thymidine incorporation assay, for example, can be used to elucidate an albumin fusion protein of the invention's activity on these cells.

[1085] Moreover, previous reports describing the biological effects of FGF-2 (basic FGF) on cortical or hippocampal neurons in vitro have demonstrated increases in both neuron survival and neurite outgrowth (Walicke et al., “Fibroblast growth factor promotes survival of dissociated hippocampal neurons and enhances neurite extension.” Proc. Natl. Acad. Sci. USA 83:3012-3016. (1986), assay herein incorporated by reference in its entirety). However, reports from experiments done on PC-12 cells suggest that these two responses are not necessarily synonymous and may depend on not only which FGF is being tested but also on which receptor(s) are expressed on the target cells. Using the primary cortical neuronal culture paradigm, the ability of an albumin fusion protein of the invention to induce neurite outgrowth can be compared to the response achieved with FGF-2 using, for example, a thymidine incorporation assay.

[1086] Fibroblast and Endothelial Cell Assays

[1087] Human lung fibroblasts are obtained from Clonetics (San Diego, Calif.) and maintained in growth media from Clonetics. Dermal microvascular endothelial cells are obtained from Cell Applications (San Diego, Calif.). For proliferation assays, the human lung fibroblasts and dermal microvascular endothelial cells can be cultured at 5,000 cells/well in a 96-well plate for one day in growth medium. The cells are then incubated for one day in 0.1% BSA basal medium. After replacing the medium with fresh 0.1% BSA medium, the cells are incubated with the test fusion protein of the invention proteins for 3 days. Alamar Blue (Alamar Biosciences, Sacramento, Calif.) is added to each well to a final concentration of 10%. The cells are incubated for 4 hr. Cell viability is measured by reading in a CytoFluor fluorescence reader. For the PGE₂ assays, the human lung fibroblasts are cultured at 5,000 cells/well in a 96-well plate for one day. After a medium change to 0.1% BSA basal medium, the cells are incubated with FGF-2 or fusion protein of the invention with or without IL-1α for 24 hours. The supernatants are collected and assayed for PGE₂ by EIA kit (Cayman, Ann Arbor, Mich.). For the IL-6 assays, the human lung fibroblasts are cultured at 5,000 cells/well in a 96-well plate for one day. After a medium change to 0.1% BSA basal medium, the cells are incubated with FGF-2 or with or without an albumin fusion protein of the invention and/or IL-1α for 24 hours. The supernatants are collected and assayed for IL-6 by ELISA kit (Endogen, Cambridge, Mass.).

[1088] Human lung fibroblasts are cultured with FGF-2 or an albumin fusion protein of the invention for 3 days in basal medium before the addition of Alamar Blue to assess effects on growth of the fibroblasts. FGF-2 should show a stimulation at 10-2500 ng/ml which can be used to compare stimulation with the fusion protein of the invention.

[1089] Cell Proliferation Based on [3H]Thymidine Incorporation

[1090] The following [3H]Thymidine incorporation assay can be used to measure the effect of a Therapeutic proteins, e.g., growth factor proteins, on the proliferation of cells such as fibroblast cells, epithelial cells or immature muscle cells.

[1091] Sub-confluent cultures are arrested in G1 phase by an 18 h incubation in serum-free medium. Therapeutic proteins are then added for 24 h and during the last 4 h, the cultures are labeled with [3H]thymidine, at a final concentration of 0.33 μM (25 Ci/mmol, Amersham, Arlington Heights, Ill.). The incorporated [3H]thymidine is precipitated with ice-cold 10% trichloroacetic acid for 24 h. Subsequently, the cells are rinsed sequentially with ice-cold 10% trichloroacetic acid and then with ice-cold water. Following lysis in 0.5 M NaOH, the lysates and PBS rinses (500 ml) are pooled, and the amount of radioactivity is measured.

[1092] Parkinson Models.

[1093] The loss of motor function in Parkinson's disease is attributed to a deficiency of striatal dopamine resulting from the degeneration of the nigrostriatal dopaminergic projection neurons. An animal model for Parkinson's that has been extensively characterized involves the systemic administration of 1-methyl-4 phenyl 1,2,3,6-tetrahydropyridine (MPTP). In the CNS, MPTP is taken-up by astrocytes and catabolized by monoamine oxidase B to 1-methyl-4-phenyl pyridine (MPP⁺) and released. Subsequently, MPP⁺ is actively accumulated in dopaminergic neurons by the high-affinity reuptake transporter for dopamine. MPP⁺ is then concentrated in mitochondria by the electrochemical gradient and selectively inhibits nicotidamide adenine disphosphate: ubiquinone oxidoreductionase (complex I), thereby interfering with electron transport and eventually generating oxygen radicals.

[1094] It has been demonstrated in tissue culture paradigms that FGF-2 (basic FGF) has trophic activity towards nigral dopaminergic neurons (Ferrari et al., Dev. Biol. 1989). Recently, Dr. Unsicker's group has demonstrated that administering FGF-2 in gel foam implants in the striatum results in the near complete protection of nigral dopaminergic neurons from the toxicity associated with MPTP exposure (Otto and Unsicker, J. Neuroscience, 1990).

[1095] Based on the data with FGF-2, an albumin fusion protein of the invention can be evaluated to determine whether it has an action similar to that of FGF-2 in enhancing dopaminergic neuronal survival in vitro and it can also be tested in vivo for protection of dopaminergic neurons in the striatum from the damage associated with MPTP treatment. The potential effect of an albumin fusion protein of the invention is first examined in vitro in a dopaminergic neuronal cell culture paradigm. The cultures are prepared by dissecting the midbrain floor plate from gestation day 14 Wistar rat embryos. The tissue is dissociated with trypsin and seeded at a density of 200,000 cells/cm² on polyorthinine-laminin coated glass coverslips. The cells are maintained in Dulbecco's Modified Eagle's medium and F12 medium containing hormonal supplements (N1). The cultures are fixed with paraformaldehyde after 8 days in vitro and are processed for tyrosine hydroxylase, a specific marker for dopaminergic neurons, immunohistochemical staining. Dissociated cell cultures are prepared from embryonic rats. The culture medium is changed every third day and the factors are also added at that time.

[1096] Since the dopaminergic neurons are isolated from animals at gestation day 14, a developmental time which is past the stage when the dopaminergic precursor cells are proliferating, an increase in the number of tyrosine hydroxylase immunopositive neurons would represent an increase in the number of dopaminergic neurons surviving in vitro. Therefore, if a therapeutic protein of the invention acts to prolong the survival of dopaminergic neurons, it would suggest that the fusion protein may be involved in Parkinson's Disease.

[1097] The studies described in this example tested activity of albumin fusion proteins of the invention. However, one skilled in the art could easily modify the exemplified studies to test the activity of fusion proteins and polynucleotides of the invention (e.g., gene therapy).

### Example 24

### The Effect of Albumin Fusion Proteins of the Invention on the Growth of Vascular Endothelial Cells

[1098] On day 1, human umbilical vein endothelial cells (HUVEC) are seeded at 2-5×10⁴ cells/35 mm dish density in M199 medium containing 4% fetal bovine serum (FBS), 16 units/ml heparin, and 50 units/ml endothelial cell growth supplements (ECGS, Biotechnique, Inc.). On day 2, the medium is replaced with M199 containing 10% FBS, 8 units/ml heparin. An albumin fusion protein of the invention, and positive controls, such as VEGF and basic FGF (bFGF) are added, at varying concentrations. On days 4 and 6, the medium is replaced. On day 8, cell number is determined with a Coulter Counter.

[1099] An increase in the number of HUVEC cells indicates that the fusion protein may proliferate vascular endothelial cells, while a decrease in the number of HUVEC cells indicates that the fusion protein inhibits vascular endothelial cells.

[1100] The studies described in this example tested activity of an albumin fusion protein of the invention. However, one skilled in the art could easily modify the exemplified studies to test the activity of a fusion protiem and polynucleotides of the invention.

### Example 25

### Rat Corneal Wound Healing Model

[1101] This animal model shows the effect of an albumin fusion protein of the invention on neovascularization. The experimental protocol includes:

[1102] Making a 1-1.5 mm long incision from the center of cornea into the stromal layer.

[1103] Inserting a spatula below the lip of the incision facing the outer corner of the eye.

[1104] Making a pocket (its base is 1-1.5 mm form the edge of the eye).

[1105] Positioning a pellet, containing 50 ng-5 ug of an albumin fusion protein of the invention, within the pocket.

[1106] Treatment with an an albumin fusion protein of the invention can also be applied topically to the corneal wounds in a dosage range of 20 mg-500 mg (daily treatment for five days).

[1107] The studies described in this example test the activity of an albumin fusion protein of the invention. However, one skilled in the art could easily modify the exemplified studies to test the activity of fusion proteins and polynucleotides of the invention (e.g., gene therapy).

### Example 26

### Diabetic Mouse and Glucocorticoid-Impaired Wound Healing Models

[1108] Diabetic db+/db+ Mouse Model.

[1109] To demonstrate that an albumin fusion protein of the invention accelerates the healing process, the genetically diabetic mouse model of wound healing is used. The full thickness wound healing model in the db+/db+ mouse is a well characterized, clinically relevant and reproducible model of impaired wound healing. Healing of the diabetic wound is dependent on formation of granulation tissue and re-epithelialization rather than contraction (Gartner, M. H. et al., J. Surg. Res. 52:389 (1992); Greenhalgh, D. G. et al., Am. J. Pathol. 136:1235 (1990)).

[1110] The diabetic animals have many of the characteristic features observed in Type II diabetes mellitus. Homozygous (db+/db+) mice are obese in comparison to their normal heterozygous (db+/+m) littermates. Mutant diabetic (db+/db+) mice have a single autosomal recessive mutation on chromosome 4 (db+) (Coleman et al. Proc. Natl. Acad. Sci. USA 77:283-293 (1982)). Animals show polyphagia, polydipsia and polyuria. Mutant diabetic mice (db+/db+) have elevated blood glucose, increased or normal insulin levels, and suppressed cell-mediated immunity (Mandel et al, J. Immunol. 120:1375 (1978); Debray-Sachs, M. et al., Clin. Exp. Immunol. 51(1):1-7 (1983); Leiter et al., Am. J. of Pathol. 114:46-55 (1985)). Peripheral neuropathy, myocardial complications, and microvascular lesions, basement membrane thickening and glomerular filtration abnormalities have been described in these animals (Norido, F. et al., Exp. Neurol. 83(2):221-232 (1984); Robertson et al., Diabetes 29(1):60-67 (1980); Giacomelli et al., Lab Invest. 40(4):460-473 (1979); Coleman, D. L., Diabetes 31 (Suppl):1-6 (1982)). These homozygous diabetic mice develop hyperglycemia that is resistant to insulin analogous to human type II diabetes (Mandel et al., J. Immunol. 120:1375-1377 (1978)).

[1111] The characteristics observed in these animals suggests that healing in this model may be similar to the healing observed in human diabetes (Greenhalgh, et al., Am. J. of Pathol. 136:1235-1246 (1990)).

[1112] Genetically diabetic female C57BL/KsJ (db+/db+) mice and their non-diabetic (db+/+m) heterozygous littermates are used in this study (Jackson Laboratories). The animals are purchased at 6 weeks of age and are 8 weeks old at the beginning of the study. Animals are individually housed and received food and water ad libitum. All manipulations are performed using aseptic techniques. The experiments are conducted according to the rules and guidelines of Human Genome Sciences, Inc. Institutional Animal Care and Use Committee and the Guidelines for the Care and Use of Laboratory Animals.

[1113] Wounding protocol is performed according to previously reported methods (Tsuboi, R. and Rifkin, D. B., J. Exp. Med. 172:245-251 (1990)). Briefly, on the day of wounding, animals are anesthetized with an intraperitoneal injection of Avertin (0.01 mg/mL), 2,2,2-tribromoethanol and 2-methyl-2-butanol dissolved in deionized water. The dorsal region of the animal is shaved and the skin washed with 70% ethanol solution and iodine. The surgical area is dried with sterile gauze prior to wounding. An 8 mm full-thickness wound is then created using a Keyes tissue punch. Immediately following wounding, the surrounding skin is gently stretched to eliminate wound expansion. The wounds are left open for the duration of the experiment. Application of the treatment is given topically for 5 consecutive days commencing on the day of wounding. Prior to treatment, wounds are gently cleansed with sterile saline and gauze sponges.

[1114] Wounds are visually examined and photographed at a fixed distance at the day of surgery and at two day intervals thereafter. Wound closure is determined by daily measurement on days 1-5 and on day 8. Wounds are measured horizontally and vertically using a calibrated Jameson caliper. Wounds are considered healed if granulation tissue is no longer visible and the wound is covered by a continuous epithelium.

[1115] An albumin fusion protein of the invention is administered using at a range different doses, from 4 mg to 500 mg per wound per day for 8 days in vehicle. Vehicle control groups received 50 mL of vehicle solution.

[1116] Animals are euthanized on day 8 with an intraperitoneal injection of sodium pentobarbital (300 mg/kg). The wounds and surrounding skin are then harvested for histology and immunohistochemistry. Tissue specimens are placed in 10% neutral buffered formalin in tissue cassettes between biopsy sponges for further processing.

[1117] Three groups of 10 animals each (5 diabetic and 5 non-diabetic controls) are evaluated: 1) Vehicle placebo control, 2) untreated group, and 3) treated group.

[1118] Wound closure is analyzed by measuring the area in the vertical and horizontal axis and obtaining the total square area of the wound. Contraction is then estimated by establishing the differences between the initial wound area (day 0) and that of post treatment (day 8). The wound area on day 1 is 64 mm², the corresponding size of the dermal punch. Calculations are made using the following formula:

[Open area on day 8]−[Open area on day 1]/[Open area on day 1]

[1119] Specimens are fixed in 10% buffered formalin and paraffin embedded blocks are sectioned perpendicular to the wound surface (5 mm) and cut using a Reichert-Jung microtome. Routine hematoxylin-eosin (H&E) staining is performed on cross-sections of bisected wounds. Histologic examination of the wounds are used to assess whether the healing process and the morphologic appearance of the repaired skin is altered by treatment with an albumin fusion protein of-the invention., This assessment included verification of the presence of cell accumulation, inflammatory cells, capillaries, fibroblasts, re-epithelialization and epidermal maturity (Greenhalgh, D. G. et al., Am. J. Pathol. 136:1235 (1990)). A calibrated lens micrometer is used by a blinded observer.

[1120] Tissue sections are also stained immunohistochemically with a polyclonal rabbit anti-human keratin antibody using ABC Elite detection system. Human skin is used as a positive tissue control while non-immune IgG is used as a negative control. Keratinocyte growth is determined by evaluating the extent of reepithelialization of the wound using a calibrated lens micrometer.

[1121] Proliferating cell nuclear antigen/cyclin (PCNA) in skin specimens is demonstrated by using anti-PCNA antibody (1:50) with an ABC Elite detection system. Human colon cancer served as a positive tissue control and human brain tissue is used as a negative tissue control. Each specimen included a section with omission of the primary antibody and substitution with non-immune mouse IgG. Ranking of these sections is based on the extent of proliferation on a scale of 0-8, the lower side of the scale reflecting slight proliferation to the higher side reflecting intense proliferation.

[1122] Experimental data are analyzed using an unpaired t test. A p value of <0.05 is considered significant.

[1123] Steroid Impaired Rat Model

[1124] The inhibition of wound healing by steroids has been well documented in various in vitro and in vivo systems (Wahl, Glucocorticoids and Wound healing. In: Anti-Inflammatory Steroid Action: Basic and Clinical Aspects. 280-302 (1989); Wahl et al., J. Immunol. 115: 476-481 (1975); Werb et al., J. Exp. Med. 147:1684-1694 (1978)). Glucocorticoids retard wound healing by inhibiting angiogenesis, decreasing vascular permeability (Ebert et al., An. Intern. Med. 37:701-705 (1952)), fibroblast proliferation, and collagen synthesis (Beck et al., Growth Factors. 5: 295-304 (1991); Haynes et al., J. Clin. Invest. 61: 703-797 (1978)) and producing a transient reduction of circulating monocytes (Haynes et al., J. Clin. Invest. 61: 703-797 (1978); Wahl, “Glucocorticoids and wound healing”, In: Antiinflammatory Steroid Action: Basic and Clinical Aspects, Academic Press, New York, pp. 280-302 (1989)). The systemic administration of steroids to impaired wound healing is a well establish phenomenon in rats (Beck et al., Growth Factors. 5: 295-304 (1991); Haynes et al., J. Clin. Invest. 61: 703-797 (1978); Wahl, “Glucocorticoids and wound healing”, In: Antiinflammatory Steroid Action: Basic and Clinical Aspects, Academic Press, New York, pp. 280-302 (1989); Pierce et al., Proc. Natl. Acad. Sci. USA 86: 2229-2233 (1989)).

[1125] To demonstrate that an albumin fusion protein of the invention can accelerate the healing process, the effects of multiple topical applications of the fusion protein on full thickness excisional skin wounds in rats in which healing has been impaired by the systemic administration of methylprednisolone is assessed.

[1126] Young adult male Sprague Dawley rats weighing 250-300 g (Charles River Laboratories) are used in this example. The animals are purchased at 8 weeks of age and are 9 weeks old at the beginning of the study. The healing response of rats is impaired by the systemic administration of methylprednisolone (17 mg/kg/rat intramuscularly) at the time of wounding. Animals are individually housed and received food and water ad libitum. All manipulations are performed using aseptic techniques. This study is conducted according to the rules and guidelines of Human Genome Sciences, Inc. Institutional Animal Care and Use Committee and the Guidelines for the Care and Use of Laboratory Animals.

[1127] The wounding protocol is followed according to that described above. On the day of wounding, animals are anesthetized with an intramuscular injection of ketamine (50 mg/kg) and xylazine (5 mg/kg). The dorsal region of the animal is shaved and the skin washed with 70% ethanol and iodine solutions. The surgical area is dried with sterile gauze prior to wounding. An 8 mm full-thickness wound is created using a Keyes tissue punch. The wounds are left open for the duration of the experiment. Applications of the testing materials are given topically once a day for 7 consecutive days commencing on the day of wounding and subsequent to methylprednisolone administration. Prior to treatment, wounds are gently cleansed with sterile saline and gauze sponges.

[1128] Wounds are visually examined and photographed at a fixed distance at the day of wounding and at the end of treatment. Wound closure is determined by daily measurement on days 1-5 and on day 8. Wounds are measured horizontally and vertically using a calibrated Jameson caliper. Wounds are considered healed if granulation tissue is no longer visible and the wound is covered by a continuous epithelium.

[1129] The fusion protein of the invention is administered using at a range different doses, from 4 mg to 500 mg per wound per day for 8 days in vehicle. Vehicle control groups received 50 mL of vehicle solution.

[1130] Animals are euthanized on day 8 with an intraperitoneal injection of sodium pentobarbital (300 mg/kg). The wounds and surrounding skin are then harvested for histology. Tissue specimens are placed in 10% neutral buffered formalin in tissue cassettes between biopsy sponges for further processing.

[1131] Three groups of 10 animals each (5 with methylprednisolone and 5 without glucocorticoid) are evaluated: 1) Untreated group 2) Vehicle placebo control 3) treated groups.

[1132] Wound closure is analyzed by measuring the area in the vertical and horizontal axis and obtaining the total area of the wound. Closure is then estimated by establishing the differences between the initial wound area (day 0) and that of post treatment (day 8). The wound area on day 1 is 64 mm², the corresponding size of the dermal punch. Calculations are made using the following formula:

[Open area on day 8]−[Open area on day 1]/[Open area on day 1]

[1133] Specimens are fixed in 10% buffered formalin and paraffin embedded blocks are sectioned perpendicular to the wound surface (5 mm) and cut using an Olympus microtome. Routine hematoxylin-eosin (H&E) staining is performed on cross-sections of bisected wounds. Histologic examination of the wounds allows assessment of whether the healing process and the morphologic appearance of the repaired skin is improved by treatment with an albumin fusion protein of the invention. A calibrated lens micrometer is used by a blinded observer to determine the distance of the wound gap.

[1134] Experimental data are analyzed using an unpaired t test. A p value of <0.05 is considered significant.

[1135] The studies described in this example tested activity of an albumin fusion protein of the invention. However, one skilled in the art could easily modify the exemplified studies to test the activity of fusion proteins and polynucleotides of the invention (e.g., gene therapy).

### Example 27

### Lymphedema Animal Model

[1136] The purpose of this experimental approach is to create an appropriate and consistent lymphedema model for testing the therapeutic effects of an albumin fusion protein of the invention in lymphangiogenesis and re-establishment of the lymphatic circulatory system in the rat hind limb. Effectiveness is measured by swelling volume of the affected limb, quantification of the amount of lymphatic vasculature, total blood plasma protein, and histopathology. Acute lymphedema is observed for 7-10 days. Perhaps more importantly, the chronic progress of the edema is followed for up to 3-4 weeks.

[1137] Prior to beginning surgery, blood sample is drawn for protein concentration analysis. Male rats weighing approximately 350 g are dosed with Pentobarbital. Subsequently, the right legs are shaved from knee to hip. The shaved area is swabbed with gauze soaked in 70% EtOH. Blood is drawn for serum total protein testing. Circumference and volumetric measurements are made prior to injecting dye into paws after marking 2 measurement levels (0.5 cm above heel, at mid-pt of dorsal paw). The intradermal dorsum of both right and left paws are injected with 0.05 ml of 1% Evan's Blue. Circumference and volumetric measurements are then made following injection of dye into paws.

[1138] Using the knee joint as a landmark, a mid-leg inguinal incision is made circumferentially allowing the femoral vessels to be located. Forceps and hemostats are used to dissect and separate the skin flaps. After locating the femoral vessels, the lymphatic vessel that runs along side and underneath the vessel(s) is located. The main lymphatic vessels in this area are then electrically coagulated or suture ligated.

[1139] Using a microscope, muscles in back of the leg (near the semitendinosis and adductors) are bluntly dissected. The popliteal lymph node is then located. The 2 proximal and 2 distal lymphatic vessels and distal blood supply of the popliteal node are then ligated by suturing. The popliteal lymph node, and any accompanying adipose tissue, is then removed by cutting connective tissues.

[1140] Care is taken to control any mild bleeding resulting from this procedure. After lymphatics are occluded, the skin flaps are sealed by using liquid skin (Vetbond) (A J Buck). The separated skin edges are sealed to the underlying muscle tissue while leaving a gap of ˜0.5 cm around the leg. Skin also may be anchored by suturing to underlying muscle when necessary.

[1141] To avoid infection, animals are housed individually with mesh (no bedding). Recovering animals are checked daily through the optimal edematous peak, which typically occurred by day 5-7. The plateau edematous peak are then observed. To evaluate the intensity of the lymphedema, the circumference and volumes of 2 designated places on each paw before operation and daily for 7 days are measured. The effect of plasma proteins on lymphedema is determined and whether protein analysis is a useful testing perimeter is also investigated. The weights of both control and edematous limbs are evaluated at 2 places. Analysis is performed in a blind manner.

[1142] Circumference Measurements: Under brief gas anesthetic to prevent limb movement, a cloth tape is used to measure limb circumference. Measurements are done at the ankle bone and dorsal paw by 2 different people and those 2 readings are averaged. Readings are taken from both control and edematous limbs.

[1143] Volumetric Measurements: On the day of surgery, animals are anesthetized with Pentobarbital and are tested prior to surgery. For daily volumetrics animals are under brief halothane anesthetic (rapid immobilization and quick recovery), and both legs are shaved and equally marked using waterproof marker on legs. Legs are first dipped in water, then dipped into instrument to each marked level then measured by Buxco edema software (Chen/Victor). Data is recorded by one person, while the other is dipping the limb to marked area.

[1144] Blood-plasma protein measurements: Blood is drawn, spun, and serum separated prior to surgery and then at conclusion for total protein and Ca2⁺ comparison.

[1145] Limb Weight Comparison: After drawing blood, the animal is prepared for tissue collection. The limbs are amputated using a quillitine, then both experimental and control legs are cut at the ligature and weighed. A second weighing is done as the tibio-cacaneal joint is disarticulated and the foot is weighed.

[1146] Histological Preparations: The transverse muscle located behind the knee (popliteal) area is dissected and arranged in a metal mold, filled with freezeGel, dipped into cold methylbutane, placed into labeled sample bags at −80EC until sectioning. Upon sectioning, the muscle is observed under fluorescent microscopy for lymphatics.

[1147] The studies described in this example tested activity of fusion proteins of the invention. However, one skilled in the art could easily modify the exemplified studies to test the activity of fusion protein and polynucleotides of the invention (e.g., gene therapy).

### Example 28

### Suppression of TNF Alpha-Induced Adhesion Molecule Expression by an Albumin Fusion Protein of the Invention

[1148] The recruitment of lymphocytes to areas of inflammation and angiogenesis involves specific receptor-ligand interactions between cell surface adhesion molecules (CAMs) on lymphocytes and the vascular endothelium. The adhesion process, in both normal and pathological settings, follows a multi-step cascade that involves intercellular adhesion molecule-1 (ICAM-1), vascular cell adhesion molecule-1 (VCAM-1), and endothelial leukocyte adhesion molecule-1 (E-selectin) expression on endothelial cells (EC). The expression of these molecules and others on the vascular endothelium determines the efficiency with which leukocytes may adhere to the local vasculature and extravasate into the local tissue during the development of an inflammatory response. The local concentration of cytokines and growth factor participate in the modulation of the expression of these CAMs.

[1149] Tumor necrosis factor alpha (TNF-a), a potent proinflammatory cytokine, is a stimulator of all three CAMs on endothelial cells and may be involved in a wide variety of inflammatory responses, often resulting in a pathological outcome.

[1150] The potential of an albumin fusion protein of the invention to mediate a suppression of TNF-a induced CAM expression can be examined. A modified ELISA assay which uses ECs as a solid phase absorbent is employed to measure the amount of CAM expression on TNF-a treated ECs when co-stimulated with a member of the FGF family of proteins.

[1151] To perform the experiment, human umbilical vein endothelial cell (HUVEC) cultures are obtained from pooled cord harvests and maintained in growth medium (EGM-2; Clonetics, San Diego, Calif.) supplemented with 10% FCS and 1% penicillin/streptomycin in a 37 degree C. humidified incubator containing 5% CO₂. HUVECs are seeded in 96-well plates at concentrations of 1×10⁴ cells/well in EGM medium at 37 degree C. for 18-24 hrs or until confluent. The monolayers are subsequently washed 3 times with a serum-free solution of RPMI-1640 supplemented with 100 U/ml penicillin and 100 mg/ml streptomycin, and treated with a given cytokine and/or growth factor(s) for 24 h at 37 degree C. Following incubation, the cells are then evaluated for CAM expression.

[1152] Human Umbilical Vein Endothelial cells (HUVECs) are grown in a standard 96 well plate to confluence. Growth medium is removed from the cells and replaced with 90 ul of 199 Medium (10% FBS). Samples for testing and positive or negative controls are added to the plate in triplicate (in 10 ul volumes). Plates are incubated at 37 degree C. for either 5 h (selectin and integrin expression) or 24 h (integrin expression only). Plates are aspirated to remove medium and 100 μl of 0.1% paraformaldehyde-PBS (with Ca++ and Mg++) is added to each well. Plates are held at 4° C. for 30 min.

[1153] Fixative is then removed from the wells and wells are washed 1×with PBS (+Ca,Mg)+0.5% BSA and drained. Do not allow the wells to dry. Add 10 μl of diluted primary antibody to the test and control wells. Anti-ICAM-1-Biotin, Anti-VCAM-1-Biotin and Anti-E-selectin-Biotin are used at a concentration of 10 μg/ml (1:10 dilution of 0.1 mg/ml stock antibody). Cells are incubated at 37° C. for 30 min. in a humidified environment. Wells are washed ×3 with PBS (+Ca,Mg)+0.5% BSA.

[1154] Then add 20 μl of diluted ExtrAvidin-Alkaline Phosphotase (1:5,000 dilution) to each well and incubated at 37° C. for 30 min. Wells are washed ×3 with PBS (+Ca,Mg)+0.5% BSA. 1 tablet of p-Nitrophenol Phosphate pNPP is dissolved in 5 ml of glycine buffer (pH 10.4). 100 ul of pNPP substrate in glycine buffer is added to each test well. Standard wells in triplicate are prepared from the working dilution of the ExtrAvidin-Alkaline Phosphotase in glycine buffer: 1:5,000 (10⁰)>10^{-0.5}>10⁻¹>10^{1.5}. 5 μl of each dilution is added to triplicate wells and the resulting AP content in each well is 5.50 ng, 1.74 ng, 0.55 ng, 0.18 ng. 100 μl of pNNP reagent must then be added to each of the standard wells. The plate must be incubated at 37° C. for 4 h. A volume of 50 ill of 3M NaOH is added to all wells. The results are quantified on a plate reader at 405 nm. The background subtraction option is used on blank wells filled with glycine buffer only. The template is set up to indicate the concentration of AP-conjugate in each standard well [5.50 ng; 1.74 ng; 0.55 ng; 0.18 ng]. Results are indicated as amount of bound AP-conjugate in each sample.

[1155] The studies described in this example tested activity of fusion proteins of the invention. However, one skilled in the art could easily modify the exemplified studies to test the activity of fusion proteins and polynucleotides of the invention (e.g., gene therapy).

### Example 29

### Construction of GAS Reporter Construct

[1156] One signal transduction pathway involved in the differentiation and proliferation of cells is called the Jaks-STATs pathway. Activated proteins in the Jaks-STATs pathway bind to gamma activation site “GAS” elements or interferon-sensitive responsive element (“ISRE”), located in the promoter of many genes. The binding of a protein to these elements alter the expression of the associated gene.

[1157] GAS and ISRE elements are recognized by a class of transcription factors called Signal Transducers and Activators of Transcription, or “STATs.” There are six members of the STATs family. Stat1 and Stat3 are present in many cell types, as is Stat2 (as response to IFN-alpha is widespread). Stat4 is more restricted and is not in many cell types though it has been found in T helper class I, cells after treatment with IL-12. Stat5 was originally called mammary growth factor, but has been found at higher concentrations in other cells including myeloid cells. It can be activated in tissue culture cells by many cytokines.

[1158] The STATs are activated to translocate from the cytoplasm to the nucleus upon tyrosine phosphorylation by a set of kinases known as the Janus Kinase (“Jaks”) family. Jaks represent a distinct family of soluble tyrosine kinases and include Tyk2, Jak1, Jak2, and Jak3. These kinases display significant sequence similarity and are generally catalytically inactive in resting cells.

[1159] The Jaks are activated by a wide range of receptors summarized in the Table below. (Adapted from review by Schidler and Darnell, Ann. Rev. Biochem. 64:621-51 (1995)). A cytokine receptor family, capable of activating Jaks, is divided into two groups: (a) Class 1 includes receptors for IL-2, IL-3, IL-4, IL-6, IL-7, IL-9, IL-11, IL-12, IL-15, Epo, PRL, GH, G-CSF, GM-CSF, LIF, CNTF, and thrombopoietin; and (b) Class 2 includes IFN-a, IFN-g, and IL-10. The Class 1 receptors share a conserved cysteine motif (a set of four conserved cysteines and one tryptophan) and a WSXWS motif (a membrane proximal region encoding Trp-Ser-Xaa-Trp-Ser (SEQ ID NO: 37)).

[1160] Thus, on binding of a ligand to a receptor, Jaks are activated, which in turn activate STATs, which then translocate and bind to GAS elements. This entire process is encompassed in the Jaks-STATs signal transduction pathway. Therefore, activation of the Jaks-STATs pathway, reflected by the binding of the GAS or the ISRE element, can be used to indicate proteins involved in the proliferation and differentiation of cells. For example, growth factors and cytokines are known to activate the Jaks-STATs pathway (See Table below). Thus, by using GAS elements linked to reporter molecules, activators of the Jaks-STATs pathway can be identified.

| | | | | | | GAS |
|---|---|---|---|---|---|---|
| | JAKs | | | | | (elements) |
| Ligand | tyk2 | Jak1 | Jak2 | Jak3 | STATS | or ISRE |
| IFN family | | | | | | |
| IFN-a/B | + | + | − | − | 1, 2, 3 | ISRE |
| IFN-g | | + | + | − | 1 | GAS(IRF1 > |
| | | | | | | Lys6 > IFP) |
| Il-10 | + | ? | ? | − | 1, 3 | |
| gp130 family | | | | | | |
| IL-6(Pleiotropic) | + | + | + | ? | 1, 3 | GAS(IRF1 > |
| | | | | | | Lys6 > IFP) |
| Il-11(Pleiotropic) | ? | + | ? | ? | 1, 3 | |
| OnM(Pleiotropic) | ? | + | + | ? | 1, 3 | |
| LIF(Pleiotropic) | ? | + | + | ? | 1, 3 | |
| CNTF(Pleiotropic) | −/+ | + | + | ? | 1, 3 | |
| G-CSF(Pleiotropic) | ? | + | ? | ? | 1, 3 | |
| IL-12(Pleiotropic) | + | − | + | + | 1, 3 | |
| g-C family | | | | | | |
| IL-2(lymphocytes) | − | + | − | + | 1, 3, 5 | GAS |
| IL-4(lymph/ | − | + | − | + | 6 | GAS |
| myeloid) | | | | | | (IRF1 = |
| | | | | | | IFP >> Ly6) |
| | | | | | | (IgH) |
| IL-7(lymphocytes) | − | + | − | + | 5 | GAS |
| IL-9(lymphocytes) | − | + | − | + | 5 | GAS |
| IL-13(lymphocyte) | − | + | ? | ? | 6 | GAS |
| IL-15 | ? | + | ? | + | 5 | GAS |
| gp140 family | | | | | | |
| IL-3(myeloid) | − | − | + | − | 5 | GAS(IRF1 > |
| | | | | | | IFP >> Ly6) |
| IL-5(myeloid) | − | − | + | − | 5 | GAS |
| GM-CSF(myeloid) | − | − | + | − | 5 | GAS |
| Growth hormone | | | | | | |
| family | | | | | | |
| GH | ? | − | + | − | 5 | |
| PRL | ? | +/− | + | − | 1, 3, 5 | |
| EPO | ? | − | + | − | 5 | GAS |
| | | | | | | (B-CAS > |
| | | | | | | IRF1 = |
| | | | | | | IFP >> Ly6) |
| Receptor Tyrosine | | | | | | |
| Kinases | | | | | | |
| EGF | ? | + | + | − | 1, 3 | GAS(IRF1) |
| PDGF | ? | + | + | − | 1, 3 | |
| CSF-1 | ? | + | + | − | 1, 3 | GAS |
| | | | | | | (not IRF1) |

[1161] To construct a synthetic GAS containing promoter element, which is used in the Biological Assays described in Examples 32-33, a PCR based strategy is employed to generate a GAS-SV40 promoter sequence. The 5′ primer contains four tandem copies of the GAS binding site found in the IRF1 promoter and previously demonstrated to bind STATs upon induction with a range of cytokines (Rothman et al., Immunity 1:457-468 (1994).), although other GAS or ISRE elements can be used instead. The 5′ primer also contains 18 bp of sequence complementary to the SV40 early promoter sequence and is flanked with an XhoI site. The sequence of the 5′ primer is:

(SEQ ID NO: 38)

5′:GCGCCTCGAGATTTCCCCGAAATCTAGATTTCCCCGAAATGATTTCC
CCGAAATGATTTCCCCGAAATATCTGCCATCTCAATTAG:3′

[1162] The downstream primer is complementary to the SV40 promoter and is flanked with a Hind III site: 5′:GCGGCAAGCTTTTTGCAAAGCCTAGGC:3′ (SEQ ID NO: 39) PCR amplification is performed using the SV40 promoter template present in the B-gal:promoter plasmid obtained from Clontech. The resulting PCR fragment is digested with XhoI/Hind III and subcloned into BLSK2-. (Stratagene.) Sequencing with forward and reverse primers confirms that the insert contains the following sequence:

(SEQ ID NO: 40)

5′-CTCGAGATTTCCCCGAAATCTAGATTTCCCCGAAATGATTTCCCCGA
AATGATTTCCCCGAAATATCTGCCATCTCAATTAGTCAGCAACCATAGTC
CCGCCCCTAACTCCGCCCATCCCGCCCCTAACTCCGCCCAGTTCCGCCCA
TTCTCCGCCCCATGGCTGACTAATTTTTTTTATTTATGCAGAGGCCGAGG
CCGCCTCGGCCTCTGAGCTATTCCAGAAGTAGTGAGGAGGCTTTTTTGGA
GGCCTAGGCTTTTGCAAAAAGCTT:3′

[1163] With this GAS promoter element linked to the SV40 promoter, a GAS:SEAP2 reporter construct is next engineered. Here, the reporter molecule is a secreted alkaline phosphatase, or “SEAP.” Clearly, however, any reporter molecule can be instead of SEAP, in this or in any of the other Examples. Well known reporter molecules that can be used instead of SEAP include chloramphenicol acetyltransferase (CAT), luciferase, alkaline phosphatase, B-galactosidase, green fluorescent protein (GFP), or any protein detectable by an antibody.

[1164] The above sequence confirmed synthetic GAS-SV40 promoter element is subcloned into the pSEAP-Promoter vector obtained from Clontech using HindIII and XhoI, effectively replacing the SV40 promoter with the amplified GAS:SV40 promoter element, to create the GAS-SEAP vector. However, this vector does not contain a neomycin resistance gene, and therefore, is not preferred for mammalian expression systems.

[1165] Thus, in order to generate mammalian stable cell lines expressing the GAS-SEAP reporter, the GAS-SEAP cassette is removed from the GAS-SEAP vector using SalI and NotI, and inserted into a backbone vector containing the neomycin resistance gene, such as pGFP-1 (Clontech), using these restriction sites in the multiple cloning site, to create the GAS-SEAP/Neo vector. Once this vector is transfected into mammalian cells, this vector can then be used as a reporter molecule for GAS binding as described in Examples 32-33.

[1166] Other constructs can be made using the above description and replacing GAS with a different promoter sequence. For example, construction of reporter molecules containing EGR and NF-KB promoter sequences are described in Examples 34 and 35. However, many other promoters can be substituted using the protocols described in these Examples. For instance, SRE, IL-2, NFAT, or Osteocalcin promoters can be substituted, alone or in combination (e.g., GAS/NF-KB/EGR, GAS/NF-KB, Il-2/NFAT, or NF-KB/GAS). Similarly, other cell lines can be used to test reporter construct activity, such as HELA (epithelial), HUVEC (endothelial), Reh (B-cell), Saos-2 (osteoblast), HUVAC (aortic), or Cardiomyocyte.

### Example 30

### Assay for SEAP Activity

[1167] As a reporter molecule for the assays described in examples disclosed herein, SEAP activity is assayed using the Tropix Phospho-light Kit (Cat. BP-400) according to the following general procedure. The Tropix Phospho-light Kit supplies the Dilution, Assay, and Reaction Buffers used below.

[1168] Prime a dispenser with the 2.5×Dilution Buffer and dispense 15 ul of 2.5×dilution buffer into Optiplates containing 35 ul of a solution containing an albumin fusion protein of the invention. Seal the plates with a plastic sealer and incubate at 65 degree C. for 30 min. Separate the Optiplates to avoid uneven heating.

[1169] Cool the samples to room temperature for 15 minutes. Empty the dispenser and prime with the Assay Buffer. Add 50 ml Assay Buffer and incubate at room temperature 5 min. Empty the dispenser and prime with the Reaction Buffer (see the Table below). Add 50 ul Reaction Buffer and incubate at room temperature for 20 minutes. Since the intensity of the chemiluminescent signal is time dependent, and it takes about 10 minutes to read 5 plates on a luminometer, thus one should treat 5 plates at each time and start the second set 10 minutes later.

[1170] Read the relative light unit in the luminometer. Set H12 as blank, and print the results. An increase in chemiluminescence indicates reporter activity.

Reaction Buffer Formulation:

| # of | Rxn buffer diluent | CSPD |
|---|---|---|
| plates | (ml) | (ml) |
| 10 | 60 | 3 |
| 11 | 65 | 3.25 |
| 12 | 70 | 3.5 |
| 13 | 75 | 3.75 |
| 14 | 80 | 4 |
| 15 | 85 | 4.25 |
| 16 | 90 | 4.5 |
| 17 | 95 | 4.75 |
| 18 | 100 | 5 |
| 19 | 105 | 5.25 |
| 20 | 110 | 5.5 |
| 21 | 115 | 5.75 |
| 22 | 120 | 6 |
| 23 | 125 | 6.25 |
| 24 | 130 | 6.5 |
| 25 | 135 | 6.75 |
| 26 | 140 | 7 |
| 27 | 145 | 7.25 |
| 28 | 150 | 7.5 |
| 29 | 155 | 7.75 |
| 30 | 160 | 8 |
| 31 | 165 | 8.25 |
| 32 | 170 | 8.5 |
| 33 | 175 | 8.75 |
| 34 | 180 | 9 |
| 35 | 185 | 9.25 |
| 36 | 190 | 9.5 |
| 37 | 195 | 9.75 |
| 38 | 200 | 10 |
| 39 | 205 | 10.25 |
| 40 | 210 | 10.5 |
| 41 | 215 | 10.75 |
| 42 | 220 | 11 |
| 43 | 225 | 11.25 |
| 44 | 230 | 11.5 |
| 45 | 235 | 11.75 |
| 46 | 240 | 12 |
| 47 | 245 | 12.25 |
| 48 | 250 | 12.5 |
| 49 | 255 | 12.75 |
| 50 | 260 | 13 |

### Example 31

### Assay Identifying Neuronal Activity.

[1171] When cells undergo differentiation and proliferation, a group of genes are activated through many different signal transduction pathways. One of these genes, EGR1 (early growth response gene 1), is induced in various tissues and cell types upon activation. The promoter of EGR1 is responsible for such induction. Using the EGR1 promoter linked to reporter molecules, the ability of fusion proteins of the invention to activate cells can be assessed.

[1172] Particularly, the following protocol is used to assess neuronal activity in PC12 cell lines. PC12 cells (rat phenochromocytoma cells) are known to proliferate and/or differentiate by activation with a number of mitogens, such as TPA (tetradecanoyl phorbol acetate), NGF (nerve growth factor), and EGF (epidermal growth factor). The EGR1 gene expression is activated during this treatment. Thus, by stably transfecting PC12 cells with a construct containing an EGR promoter linked to SEAP reporter, activation of PC12 cells by an albumin fusion protein of the present invention can be assessed.

[1173] The EGR/SEAP reporter construct can be assembled by the following protocol. The EGR-1 promoter sequence (−633 to +1)(Sakamoto K et al., Oncogene 6:867-871 (1991)) can be PCR amplified from human genomic DNA using the following primers:

(SEQ ID NO: 41)

5′ GCGCTCGAGGGATGACAGCGATAGAACCCCGG-3′

(SEQ ID NO: 42)

5′ GCGAAGCTTCGCGACTCCCCGGATCCGCCTC-3′

[1174] Using the GAS:SEAP/Neo vector produced in Example 29, EGR1 amplified product can then be inserted into this vector. Linearize the GAS:SEAP/Neo vector using restriction enzymes XhoI/HindIII, removing the GAS/SV40 stuffer. Restrict the EGR1 amplified product with these same enzymes. Ligate the vector and the EGR1 promoter.

[1175] To prepare 96 well-plates for cell culture, two mls of a coating solution (1:30 dilution of collagen type I (Upstate Biotech Inc. Cat#08-115) in 30% ethanol (filter sterilized)) is added per one 10 cm plate or 50 ml per well of the 96-well plate, and allowed to air dry for 2 hr.

[1176] PC 12 cells are routinely grown in RPMI-1640 medium (Bio Whittaker) containing 10% horse serum (JRH BIOSCIENCES, Cat. # 12449-78P), 5% heat-inactivated fetal bovine serum (FBS) supplemented with 100 units/ml penicillin and 100 ug/ml streptomycin on a precoated 10 cm tissue culture dish. One to four split is done every three to four days. Cells are removed from the plates by scraping and resuspended with pipetting up and down for more than 15 times.

[1177] Transfect the EGR/SEAP/Neo construct into PC12 using techniques known in the art. EGR-SEAP/PC12 stable cells are obtained by growing the cells in 300 ug/ml G418. The G418-free medium is used for routine growth but every one to two months, the cells should be re-grown in 300 ug/ml G418 for couple of passages.

[1178] To assay for neuronal activity, a 10 cm plate with cells around 70 to 80% confluent is screened by removing the old medium. Wash the cells once with PBS (Phosphate buffered saline). Then starve the cells in low serum medium (RPMI-1640 containing 1% horse serum and 0.5% FBS with antibiotics) overnight.

[1179] The next morning, remove the medium and wash the cells with PBS. Scrape off the cells from the plate, suspend the cells well in 2 ml low serum medium. Count the cell number and add more low serum medium to reach final cell density as 5×10⁵ cells/ml.

[1180] Add 200 ul of the cell suspension to each well of 96-well plate (equivalent to 1×10⁵ cells/well). Add a series of different concentrations of an albumin fusion protein of the inventon, 37 degree C. for 48 to 72 hr. As a positive control, a growth factor known to activate PC12 cells through EGR can be used, such as 50 ng/ul of Neuronal Growth Factor (NGF). Over fifty-fold induction of SEAP is typically seen in the positive control wells. SEAP assay may be routinely performed using techniques known in the art and/or as described in Example 30.

### Example 32

### Assay for T-Cell Activity

[1181] The following protocol is used to assess T-cell activity by identifying factors, and determining whether an albumin fusion protein of the invention proliferates and/or differentiates T-cells. T-cell activity is assessed using the GAS/SEAP/Neo construct produced in Example 29. Thus, factors that increase SEAP activity indicate the ability to activate the Jaks-STATS signal transduction pathway. The T-cell used in this assay is Jurkat T-cells (ATCC Accession No. TIB-152), although Molt-3 cells (ATCC Accession No. CRL-1552) and Molt-4 cells (ATCC Accession No. CRL-1582) cells can also be used.

[1182] Jurkat T-cells are lymphoblastic CD4⁺ Th1 helper cells. In order to generate stable cell lines, approximately 2 million Jurkat cells are transfected with the GAS-SEAP/neo vector using DMRIE-C (Life Technologies)(transfection procedure described below). The transfected cells are seeded to a density of approximately 20,000 cells per well and transfectants resistant to 1 mg/ml genticin selected. Resistant colonies are expanded and then tested for their response to increasing concentrations of interferon gamma. The dose response of a selected clone is demonstrated.

[1183] Specifically, the following protocol will yield sufficient cells for 75 wells containing 200 ul of cells. Thus, it is either scaled up, or performed in multiple to generate sufficient cells for multiple 96 well plates. Jurkat cells are maintained in RPMI+10% serum with 1%Pen-Strep. Combine 2.5 mls of OPTI-MEM (Life Technologies) with 10 ug of plasmid DNA in a T25 flask. Add 2.5 ml OPTI-MEM containing 50 ul of DMRIE-C and incubate at room temperature for 15-45 mins.

[1184] During the incubation period, count cell concentration, spin down the required number of cells (10⁷ per transfection), and resuspend in OPTI-MEM to a final concentration of 10⁷ cells/ml. Then add 1 ml of 1×10⁷ cells in OPTI-MEM to T25 flask and incubate at 37 degree C. for 6 hrs. After the incubation, add 10 ml of RPMI+15% serum.

[1185] The Jurkat:GAS-SEAP stable reporter lines are maintained in RPMI+10% serum, 1 mg/ml Genticin, and 1% Pen-Strep. These cells are treated with varying concentrations of one or more fusion proteins of the present invention.

[1186] On the day of treatment with the fusion protein, the cells should be washed and resuspended in fresh RPMI+10% serum to a density of 500,000 cells per ml. The exact number of cells required will depend on the number of fusion proteins and the number of different concentrations of fusion proteins being screened. For one 96 well plate, approximately 10 million cells (for 10 plates, 100 million cells) are required.

[1187] The well dishes containing Jurkat cells treated with the fusion protein are placed in an incubator for 48 hrs (note: this time is variable between 48-72 hrs). 35 ul samples from each well are then transferred to an opaque 96 well plate using a 12 channel pipette. The opaque plates should be covered (using sellophene covers) and stored at −20 degree C. until SEAP assays are performed according to Example 30. The plates containing the remaining treated cells are placed at 4 degree C. and serve as a source of material for repeating the assay on a specific well if desired.

[1188] As a positive control, 100 Unit/ml interferon gamma can be used which is known to activate Jurkat T cells. Over 30 fold induction is typically observed in the positive control wells.

[1189] The above protocol may be used in the generation of both transient, as well as, stable transfected cells, which would be apparent to those of skill in the art.

### Example 33

### Assay for T-Cell Activity

[1190] NF-KB (Nuclear Factor KB) is a transcription factor activated by a wide variety of agents including the inflammatory cytokines IL-1 and TNF, CD30 and CD40, lymphotoxin-alpha and lymphotoxin-beta, by exposure to LPS or thrombin, and by expression of certain viral gene products. As a transcription factor, NF-KB regulates the expression of genes involved in immune cell activation, control of apoptosis (NF-KB appears to shield cells from apoptosis), B and T-cell development, anti-viral and antimicrobial responses, and multiple stress responses.

[1191] In non-stimulated conditions, NF-KB is retained in the cytoplasm with I-KB (Inhibitor KB). However, upon stimulation, I-KB is phosphorylated and degraded, causing NF-KB to shuttle to the nucleus, thereby activating transcription of target genes. Target genes activated by NF-KB include IL-2, 1L-6, GM-CSF, ICAM-1 and class 1 MHC.

[1192] Due to its central role and ability to respond to a range of stimuli, reporter constructs utilizing the NF-KB promoter element are used to screen the fusion protein. Activators or inhibitors of NF-KB would be useful in treating, preventing, and/or diagnosing diseases. For example, inhibitors of NF-KB could be used to treat those diseases related to the acute or chronic activation of NF-KB, such as rheumatoid arthritis.

[1193] To construct a vector containing the NF-KB promoter element, a PCR based strategy is employed. The upstream primer contains four tandem copies of the NF-KB binding site (GGGGACTTTCCC) (SEQ BD NO: 43), 18 bp of sequence complementary to the 5′ end of the SV40 early promoter sequence, and is flanked with an XhoI site:

(SEQ ID NO: 44)

5′:GCGGCCTCGAGGGGACTTTCCCGGGGACTTTCCGGGGACTTTCCGGG
ACTTTCCATCCTGCCATCTCAATTAG:3′

[1194] The downstream primer is complementary to the 3′ end of the SV40 promoter and is flanked with a Hind III site:

| | |
|---|---|
| 5′:GCGGCAAGCTTTTTGCAAAGCCTAGGC:3′ | (SEQ ID NO: 39) |

[1195] PCR amplification is performed using the SV40 promoter template present in the pB-gal:promoter plasmid obtained from Clontech. The resulting PCR fragment is digested with XhoI and Hind III and subcloned into BLSK2-. (Stratagene) Sequencing with the T7 and T3 primers confirms the insert contains the following sequence:

(SEQ ID NO: 45)

5′:CTCGAGGGGACTTTCCCGGGGACTTTCCGGGGACTTTCCGGGACTTT
CCATCTGCCATCTCAATTAGTCAGCAACCATAGTCCCGCCCCTAACTCCG
CCCATCCCGCCCCTAACTCCGCCCAGTTCCGCCCATTCTCCGCCCCATGG
CTGACTAATTTTTTTTATTTATGCAGAGGCCGAGGCCGCCTCGGCCTCTG
AGCTATTCCAGAAGTAGTGAGGAGGCTTTTTTGGAGGCCTAGGCTTTTGC
AAAAAGCTT:3′

[1196] Next, replace the SV40 minimal promoter element present in the pSEAP2-promoter plasmid (Clontech) with this NF-KB/SV40 fragment using XhoI and HindIII. However, this vector does not contain a neomycin resistance gene, and therefore, is not preferred for mammalian expression systems.

[1197] In order to generate stable mammalian cell lines, the NF-KB/SV40/SEAP cassette is removed from the above NF-KB/SEAP vector using restriction enzymes SalI and NotI, and inserted into a vector containing neomycin resistance. Particularly, the NF-KB/SV40/SEAP cassette was inserted into pGFP-1 (Clontech), replacing the GFP gene, after restricting pGFP-1 with SalI and NotI.

[1198] Once NF-KB/SV40/SEAP/Neo vector is created, stable Jurkat T-cells are created and maintained according to the protocol described in Example 32. Similarly, the method for assaying fusion proteins with these stable Jurkat T-cells is also described in Example 32. As a positive control, exogenous TNF alpha (0.1, 1, 10 ng) is added to wells H9, H1O, and H11, with a 5-10 fold activation typically observed.

### Example 33

### Assay Identifying Myeloid Activity

[1199] The following protocol is used to assess myeloid activity of an albumin fusion protein of the present invention by determining whether the fusion protein proliferates and/or differentiates myeloid cells. Myeloid cell activity is assessed using the GAS/SEAP/Neo construct produced in Example 29. Thus, factors that increase SEAP activity indicate the ability to activate the Jaks-STATS signal transduction pathway. The myeloid cell used in this assay is U937, a pre-monocyte cell line, although TF-1, HL60, or KG1 can be used.

[1200] To transiently transfect U937 cells with the GAS/SEAP/Neo construct produced in Example 29, a DEAE-Dextran method (Kharbanda et. al., 1994, Cell Growth & Differentiation, 5:259-265) is used. First, harvest 2×10⁷ U937 cells and wash with PBS. The U937 cells are usually grown in RPMI 1640 medium containing 10% heat-inactivated fetal bovine serum (FBS) supplemented with 100 units/ml penicillin and 100 mg/ml streptomycin.

[1201] Next, suspend the cells in 1 ml of 20 mM Tris-HCl (pH 7.4) buffer containing 0.5 mg/ml DEAE-Dextran, 8 ug GAS-SEAP2 plasmid DNA, 140 mM NaCl, 5 mM KCl, 375 uM Na₂HPO₄.7H₂O, 1 mM MgCl₂, and 675 uM CaCl₂. Incubate at 37 degrees C. for 45 min.

[1202] Wash the cells with RPMI 1640 medium containing 10% FBS and then resuspend in 10 ml complete medium and incubate at 37 degree C. for 36 hr.

[1203] The GAS-SEAP/U937 stable cells are obtained by growing the cells in 400 ug/ml G418. The G418-free medium is used for routine growth but every one to two months, the cells should be re-grown in 400 ug/ml G418 for couple of passages.

[1204] These cells are tested by harvesting 1×10⁸ cells (this is enough for ten 96-well plates assay) and wash with PBS. Suspend the cells in 200 ml above described growth medium, with a final density of 5×10⁵ cells/ml. Plate 200 ul cells per well in the 96-well plate (or 1×10⁵ cells/well).

[1205] Add different concentrations of the fusion protein. Incubate at 37 degee C for 48 to 72 hr. As a positive control, 100 Unit/ml interferon gamma can be used which is known to activate U937 cells. Over 30 fold induction is typically observed in the positive control wells. SEAP assay the supernatant according to methods known in the art and/or the protocol described in Example 30.

### Example 34

### Assay Identifying Changes in Small Molecule Concentration and Membrane Permeability

[1206] Binding of a ligand to a receptor is known to alter intracellular levels of small molecules, such as calcium, potassium, sodium, and pH, as well as alter membrane potential. These alterations can be measured in an assay to identify fusion proteins which bind to receptors of a particular cell. Although the following protocol describes an assay for calcium, this protocol can easily be modified to detect changes in potassium, sodium, pH, membrane potential, or any other small molecule which is detectable by a fluorescent probe.

[1207] The following assay uses Fluorometric Imaging Plate Reader (“FLIPR”) to measure changes in fluorescent molecules (Molecular Probes) that bind small molecules. Clearly, any fluorescent molecule detecting a small molecule can be used instead of the calcium fluorescent molecule, fluo-4 (Molecular Probes, Inc.; catalog no. F-14202), used here.

[1208] For adherent cells, seed the cells at 10,000-20,000 cells/well in a Co-star black 96-well plate with clear bottom. The plate is incubated in a CO₂ incubator for 20 hours. The adherent cells are washed two times in Biotek washer with 200 ul of HBSS (Hank's Balanced Salt Solution) leaving 100 ul of buffer after the final wash.

[1209] A stock solution of 1 mg/ml fluo-4 is made in 10% pluronic acid DMSO. To load the cells with fluo-4, 50 ul of 12 ug/ml fluo-4 is added to each well. The plate is incubated at 37 degrees C. in a CO₂ incubator for 60 min. The plate is washed four times in the Biotek washer with HBSS leaving 100 ul of buffer.

[1210] For non-adherent cells, the cells are spun down from culture media. Cells are re-suspended to 2-5×10⁶ cells/ml with HBSS in a 50-ml conical tube. 4 ul of 1 mg/ml fluo-4 solution in 10% pluronic acid DMSO is added to each ml of cell suspension. The tube is then placed in a 37 degrees C. water bath for 30-60 min. The cells are washed twice with HBSS, resuspended to 1×10⁶ cells/ml, and dispensed into a microplate, 100 ul/well. The plate is centrifuged at 1000 rpm for 5 min. The plate is then washed once in Denley Cell Wash with 200 ul, followed by an aspiration step to 100 ul final volume.

[1211] For a non-cell based assay, each well contains a fluorescent molecule, such as fluo-4. The fusion protein of the invention is added to the well, and a change in fluorescence is detected.

[1212] To measure the fluorescence of intracellular calcium, the FLIPR is set for the following parameters: (1) System gain is 300-800 mW; (2) Exposure time is 0.4 second; (3) Camera F/stop is F/2; (4) Excitation is 488 nm; (5) Emission is 530 nm; and (6) Sample addition is 50 ul. Increased emission at 530 nm indicates an extracellular signaling event caused by an albumin fusion protein of the present invention or a molecule induced by an albumin fusion protein of the present invention, which has resulted in an increase in the intracellular Ca⁺⁺ concentration.

### Example 35

### Assay Identifying Tyrosine Kinase Activity

[1213] The Protein Tyrosine Kinases (PTK) represent a diverse group of transmembrane and cytoplasmic kinases. Within the Receptor Protein Tyrosine Kinase (RPTK) group are receptors for a range of mitogenic and metabolic growth factors including the PDGF, FGF, EGF, NGF, HGF and Insulin receptor subfamilies. In addition there are a large family of RPTKs for which the corresponding ligand is unknown. Ligands for RPTKs include mainly secreted small proteins, but also membrane-bound and extracellular matrix proteins.

[1214] Activation of RPTK by ligands involves ligand-mediated receptor dimerization, resulting in transphosphorylation of the receptor subunits and activation of the cytoplasmic tyrosine kinases. The cytoplasmic tyrosine kinases include receptor associated tyrosine kinases of the src-family (e.g., src, yes, lck, lyn, fyn) and non-receptor linked and cytosolic protein tyrosine kinases, such as the Jak family, members of which mediate signal transduction triggered by the cytokine superfamily of receptors (e.g., the Interleukins, Interferons, GM-CSF, and Leptin).

[1215] Because of the wide range of known factors capable of stimulating tyrosine kinase activity, identifying whether an albumin fusion protein of the present invention or a molecule induced by a fusion proetin of the present invention is capable of activating tyrosine kinase signal transduction pathways is of interest. Therefore, the following protocol is designed to identify such molecules capable of activating the tyrosine kinase signal transduction pathways.

[1216] Seed target cells (e.g., primary keratinocytes) at a density of approximately 25,000 cells per well in a 96 well Loprodyne Silent Screen Plates purchased from Nalge Nunc (Naperville, Ill.). The plates are sterilized with two 30 minute rinses with 100% ethanol, rinsed with water and dried overnight. Some plates are coated for 2 hr with 100 ml of cell culture grade type I collagen (50 mg/ml), gelatin (2%) or polylysine (50 mg/ml), all of which can be purchased from Sigma Chemicals (St. Louis, Mo.) or 10% Matrigel purchased from Becton Dickinson (Bedford, Mass.), or calf serum, rinsed with PBS and stored at 4 degree C. Cell growth on these plates is assayed by seeding 5,000 cells/well in growth medium and indirect quantitation of cell number through use of alamarBlue as described by the manufacturer Alamar Biosciences, Inc. (Sacramento, Calif.) after 48 hr. Falcon plate covers #3071 from Becton Dickinson (Bedford, Mass.) are used to cover the Loprodyne Silent Screen Plates. Falcon Microtest III cell culture plates can also be used in some proliferation experiments.

[1217] To prepare extracts, A431 cells are seeded onto the nylon membranes of Loprodyne plates (20,000/200 ml/well) and cultured overnight in complete medium. Cells are quiesced by incubation in serum-free basal medium for 24 hr. After 5-20 minutes treatment with EGF (60 ng/ml) or a different concentrations of an albumin fusion protein of the invention, the medium was removed and 100 ml of extraction buffer ((20 mM HEPES pH 7.5, 0.15 M NaCl, 1% Triton X-100, 0.1% SDS, 2 mM Na3VO4, 2 mM Na4P207 and a cocktail of protease inhibitors (# 1836170) obtained from Boeheringer Mannheim (Indianapolis, Ind.)) is added to each well and the plate is shaken on a rotating shaker for 5 minutes at 4° C. The plate is then placed in a vacuum transfer manifold and the extract filtered through the 0.45 mm membrane bottoms of each well using house vacuum. Extracts are collected in a 96-well catch/assay plate in the bottom of the vacuum manifold and immediately placed on ice. To obtain extracts clarified by centrifugation, the content of each well, after detergent solubilization for 5 minutes, is removed and centrifuged for 15 minutes at 4 degree C. at 16,000×g.

[1218] Test the filtered extracts for levels of tyrosine kinase activity. Although many methods of detecting tyrosine kinase activity are known, one method is described here.

[1219] Generally, the tyrosine kinase activity of an albumin fusion protein of the invention is evaluated by determining its ability to phosphorylate a tyrosine residue on a specific substrate (a biotinylated peptide). Biotinylated peptides that can be used for this purpose include PSK1 (corresponding to amino acids 6-20 of the cell division kinase cdc2-p34) and PSK2 (corresponding to amino acids 1-17 of gastrin). Both peptides are substrates for a range of tyrosine kinases and are available from Boehringer Mannheim.

[1220] The tyrosine kinase reaction is set up by adding the following components in order. First, add 10 ul of 5 uM Biotinylated Peptide, then 10 ul ATP/Mg₂₊ (5 mM ATP/50 mM MgCl₂), then 10 ul of 5×Assay Buffer (40 mM imidazole hydrochloride, pH 7.3, 40 mM beta-glycerophosphate, 1 mM EGTA, 100 mM MgCl₂, 5 mM MnCl₂, 0.5 mg/ml BSA), then 5 ul of Sodium Vanadate(1 mM), and then 5 ul of water. Mix the components gently and preincubate the reaction mix at 30 degree C. for 2 min. Initial the reaction by adding 10 ul of the control enzyme or the filtered supernatant.

[1221] The tyrosine kinase assay reaction is then terminated by adding 10 ul of 120 mm EDTA and place the reactions on ice.

[1222] Tyrosine kinase activity is determined by transferring 50 ul aliquot of reaction mixture to a microtiter plate (MTP) module and incubating at 37 degree C. for 20 min. This allows the streptavidin coated 96 well plate to associate with the biotinylated peptide. Wash the MTP module with 300 ul/well of PBS four times. Next add 75 ul of anti-phospolyrosine antibody conjugated to horse radish peroxidase (anti-P-Tyr-POD(0.5 u/ml)) to each well and incubate at 37 degree C. for one hour. Wash the well as above.

[1223] Next add 100 ul of peroxidase substrate solution (Boehringer Mannheim) and incubate at room temperature for at least 5 mins (up to 30 min). Measure the absorbance of the sample at 405 m by using ELISA reader. The level of bound peroxidase activity is quantitated using an ELISA reader and reflects the level of tyrosine kinase activity.

### Example 36

### Assay Identifying Phosphorylation Activity

[1224] As a potential alternative and/or complement to the assay of protein tyrosine kinase activity described in Example 35, an assay which detects activation (phosphorylation) of major intracellular signal transduction intermediates can also be used. For example, as described below one particular assay can detect tyrosine phosphorylation of the Erk-1 and Erk-2 kinases. However, phosphorylation of other molecules, such as Raf, JNK, p38 MAP, Map kinase kinase (MEK), MEK kinase, Src, Muscle specific kinase (MuSK), IRAK, Tec, and Janus, as well as any other phosphoserine, phosphotyrosine, or phosphothreonine molecule, can be detected by substituting these molecules for Erk-1 or Erk-2 in the following assay.

[1225] Specifically, assay plates are made by coating the wells of a 96-well ELISA plate with 0.1 ml of protein G (lug/ml) for 2 hr at room temp, (RT). The plates are then rinsed with PBS and blocked with 3% BSA/PBS for 1 hr at RT. The protein G plates are then treated with 2 commercial monoclonal antibodies (100 ng/well) against Erk-1 and Erk-2 (1 hr at RT) (Santa Cruz Biotechnology). (To detect other molecules, this step can easily be modified by substituting a monoclonal antibody detecting any of the above described molecules.) After 3-5 rinses with PBS, the plates are stored at 4 degree C. until use.

[1226] A431 cells are seeded at 20,000/well in a 96-well Loprodyne filterplate and cultured overnight in growth medium. The cells are then starved for 48 hr in basal medium (DMEM) and then treated with EGF (6 ng/well) or varying concentrations of the fusion protein of the invention for 5-20 minutes. The cells are then solubilized and extracts filtered directly into the assay plate.

[1227] After incubation with the extract for 1 hr at RT, the wells are again rinsed. As a positive control, a commercial preparation of MAP kinase (10 ng/well) is used in place of A431 extract. Plates are then treated with a commercial polyclonal (rabbit) antibody (lug/ml) which specifically recognizes the phosphorylated epitope of the Erk-1 and Erk-2 kinases (1 hr at RT). This antibody is biotinylated by standard procedures. The bound polyclonal antibody is then quantitated by successive incubations with Europium-streptavidin and Europium fluorescence enhancing reagent in the Wallac DELFIA instrument (time-resolved fluorescence). An increased fluorescent signal over background indicates a phosphorylation by the fusion protein of the present invention or a molecule induced by an albumin fusion protein of the present invention.

### Example 37

### Assay for the Stimulation of Bone Marrow CD34+ Cell Proliferation

[1228] This assay is based on the ability of human CD34+ to proliferate in the presence of hematopoietic growth factors and evaluates the ability of fusion proteins of the inventon to stimulate proliferation of CD34+ cells.

[1229] It has been previously shown that most mature precursors will respond to only a single signal. More immature precursors require at least two signals to respond. Therefore, to test the effect of fusion proteins of the invention on hematopoietic activity of a wide range of progenitor cells, the assay contains a given fusion protein of the invention in the presence or absence of hematopoietic growth factors. Isolated cells are cultured for 5 days in the presence of Stem Cell Factor (SCF) in combination with tested sample. SCF alone has a very limited effect on the proliferation of bone marrow (BM) cells, acting in such conditions only as a “survival” factor. However, combined with any factor exhibiting stimulatory effect on these cells (e.g., IL-3), SCF will cause a synergistic effect. Therefore, if the tested fusion protein has a stimulatory effect on hematopoietic progenitors, such activity can be easily detected. Since normal BM cells have a low level of cycling cells, it is likely that any inhibitory effect of a given fusion protein might not be detected. Accordingly, assays for an inhibitory effect on progenitors is preferably tested in cells that are first subjected to in vitro stimulation with SCF+IL+3, and then contacted with the compound that is being evaluated for inhibition of such induced proliferation.

[1230] Briefly, CD34+ cells are isolated using methods known in the art. The cells are thawed and resuspended in medium (QBSF 60 serum-free medium with 1% L-glutamine (500 ml) Quality Biological, Inc., Gaithersburg, Md. Cat# 160-204-101). After several gentle centrifugation steps at 200×g, cells are allowed to rest for one hour. The cell count is adjusted to 2.5×10⁵ cells/ml. During this time, 100 μl of sterile water is added to the peripheral wells of a 96-well plate. The cytokines that can be tested with an albumin fusion protein of the invention in this assay is rhSCF (R&D Systems, Minneapolis, Minn., Cat# 255-SC) at 50 ng/ml alone and in combination with rhSCF and rhIL-3 (R&D Systems, Minneapolis, Minn., Cat# 203-ML) at 30 ng/ml. After one hour, 10 μl of prepared cytokines, varying concentrations of an albumin fusion protein of the invention, and 20 μl of diluted cells are added to the media which is already present in the wells to allow for a final total volume of 100 μl. The plates are then placed in a 37° C./5% CO₂ incubator for five days.

[1231] Eighteen hours before the assay is harvested, 0.5 μCi/well of [3H] Thymidine is added in a 10 μl volume to each well to determine the proliferation rate. The experiment is terminated by harvesting the cells from each 96-well plate to a filtermat using the Tomtec Harvester 96. After harvesting, the filtermats are dried, trimmed and placed into OmniFilter assemblies consisting of one OmniFilter plate and one OmniFilter Tray. 60 μl Microscint is added to each well and the plate sealed with TopSeal-A press-on sealing film A bar code 15 sticker is affixed to the first plate for counting. The sealed plates are then loaded and the level of radioactivity determined via the Packard Top Count and the printed data collected for analysis. The level of radioactivity reflects the amount of cell proliferation.

[1232] The studies described in this example test the activity of a given fusion protein to stimulate bone marrow CD34+ cell proliferation. One skilled in the art could easily modify the exemplified studies to test the activity of fusion porteins and polynucleotides of the invention (e.g., gene therapy) as well as agonists and antagonists thereof. The ability of an albumin fusion protein of the invention to stimulate the proliferation of bone marrow CD34+ cells indicates that the albumin fusion protein and/or polynucleotides corresponding to the fusion protein are useful for the diagnosis and treatment of disorders affecting the immune system and hematopoiesis. Representative uses are described in the “Immune Activity” and “Infectious Disease” sections above, and elsewhere herein.

### Example 38

### Assay for Extracellular Matrix Enhanced Cell Response (EMECR)

[1233] The objective of the Extracellular Matrix Enhanced Cell Response (EMECR) assay is to evaluate the ability of fusion proteins of the invention to act on hematopoietic stem cells in the context of the extracellular matrix (ECM) induced signal.

[1234] Cells respond to the regulatory factors in the context of signal(s) received from the surrounding microenvironment. For example, fibroblasts, and endothelial and epithelial stem cells fail to replicate in the absence of signals from the ECM. Hematopoietic stem cells can undergo self-renewal in the bone marrow, but not in in vitro suspension culture. The ability of stem cells to undergo self-renewal in vitro is dependent upon their interaction with the stromal cells and the ECM protein fibronectin (fn). Adhesion of cells to fn is mediated by the α₅.β₁ and α₄.β₁ integrin receptors, which are expressed by human and mouse hematopoietic stem cells. The factor(s) which integrate with the ECM environment and are responsible for stimulating stem cell self-renewal havea not yet been identified. Discovery of such factors should be of great interest in gene therapy and bone marrow transplant applications

[1235] Briefly, polystyrene, non tissue culture treated, 96-well plates are coated with fn fragment at a coating concentration of 0.2 μg/cm². Mouse bone marrow cells are plated (1,000 cells/well) in 0.2 ml of serum-free medium. Cells cultured in the presence of IL-3 (5 ng/ml)+SCF (50 ng/ml) would serve as the positive control, conditions under which little self-renewal but pronounced differentiation of the stem cells is to be expected. Albumin fusion proteins of the invention are tested with appropriate negative controls in the presence and absence of SCF (5.0 ng/ml), where volume of the administed composition containing the albumin fusion protein of the invention represents 10% of the total assay volume. The plated cells are then allowed to grow by incubating in a low oxygen environment (5% CO₂, 7% O₂, and 88% N₂) tissue culture incubator for 7 days. The number of proliferating cells within the wells is then quantitated by measuring thymidine incorporation into cellular DNA. Verification of the positive hits in the assay will require phenotypic characterization of the cells, which can be accomplished by scaling up of the culture system and using appropriate antibody reagents against cell surface antigens and FACScan.

[1236] One skilled in the art could easily modify the exemplified studies to test the activity of albumin fusion proteins and polynucleotides of the invention (e.g., gene therapy).

[1237] If a particular fusion protein of the present invention is found to be a stimulator of hematopoietic progenitors, the fusion protein and polynucleotides corresponding to the fusion protein may be useful for example, in the diagnosis and treatment of disorders affecting the immune system and hematopoiesis. Representative uses are described in the “Immune Activity” and “Infectious Disease” sections above, and elsewhere herein. The fusion protein may also be useful in the expansion of stem cells and committed progenitors of various blood lineages, and in the differentiation and/or proliferation of various cell types.

[1238] Additionally, the albumin fusion proteins of the invention and polynucleotides encoding albumin fusion proteins of the invention, may also be employed to inhibit the proliferation and differentiation of hematopoietic cells and therefore may be employed to protect bone marrow stem cells from chemotherapeutic agents during chemotherapy. This antiproliferative effect may allow administration of higher doses of chemotherapeutic agents and, therefore, more effective chemotherapeutic treatment.

[1239] Moreover, fusion proteins of the invention and polynucleotides encoding albumin fusion proteins of the invention may also be useful for the treatment and diagnosis of hematopoietic related disorders such as, anemia, pancytopenia, leukopenia, thrombocytopenia or leukemia, since stromal cells are important in the production of cells of hematopoietic lineages. The uses include bone marrow cell ex-vivo culture, bone marrow transplantation, bone marrow reconstitution, radiotherapy or chemotherapy of neoplasia.

### Example 39

### Human Dermal Fibroblast and Aortic Smooth Muscle Cell Proliferation

[1240] An albumin fusion protein of the invention is added to cultures of normal human dermal fibroblasts (NHDF) and human aortic smooth muscle cells (AoSMC) and two co-assays are performed with each sample. The first assay examines the effect of the fusion protein on the proliferation of normal human dermal fibroblasts (NHDF) or aortic smooth muscle cells (AoSMC). Aberrant growth of fibroblasts or smooth muscle cells is a part of several pathological processes, including fibrosis, and restenosis. The second assay examines IL6 production by both NHDF and SMC. IL6 production is an indication of functional activation. Activated cells will have increased production of a number of cytokines and other factors, which can result in a proinflammatory or immunomodulatory outcome. Assays are run with and without co-TNFa stimulation, in order to check for costimulatory or inhibitory activity.

[1241] Briefly, on day 1, 96-well black plates are set up with 1000 cells/well (NHDF) or 2000 cells/well (AoSMC) in 100 μl culture media. NHDF culture media contains: Clonetics FB basal media, 1 mg/ml hFGF, 5 mg/ml insulin, 50 mg/ml gentamycin, 2%FBS, while AoSMC culture media contains Clonetics SM basal media, 0.5 μg/ml hEGF, 5 mg/ml insulin, 1 μg/ml hFGF, 50 mg/ml gentamycin, 50 μg/ml Amphotericin B, 5%FBS. After incubation at 37° C. for at least 4-5 hours culture media is aspirated and replaced with growth arrest media. Growth arrest media for NHDF contains fibroblast basal media, 50 mg/ml gentamycin, 2% FBS, while growth arrest media for AoSMC contains SM basal media, 50 mg/ml gentamycin, 50 μg/ml Amphotericin B, 0.4% FBS. Incubate at 37° C. until day 2.

[1242] On day 2, serial dilutions and templates of an albumin fusion protein of the invention are designed such that they always include media controls and known-protein controls. For both stimulation and inhibition experiments, proteins are diluted in growth arrest media. For inhibition experiments, TNFa is added to a final concentration of 2 ng/ml (NHDF) or 5 ng/ml (AoSMC). Add ⅓ vol media containing controls or an albumin fusion protein of the invention and incubate at 37 degrees C./5% CO₂ until day 5.

[1243] Transfer 60 μl from each well to another labeled 96-well plate, cover with a plate-sealer, and store at 4 degrees C. until Day 6 (for IL6 ELISA). To the remaining 100 μl in the cell culture plate, aseptically add Alamar Blue in an amount equal to 10% of the culture volume (10 μl). Return plates to incubator for 3 to 4 hours. Then measure fluorescence with excitation at 530 nm and emission at 590 nm using the CytoFluor. This yields the growth stimulation/inhibition data.

[1244] On day 5, the IL6 ELISA is performed by coating a 96 well plate with 50-100 ul/well of Anti-Human IL6 Monoclonal antibody diluted in PBS, pH 7.4, incubate ON at room temperature.

[1245] On day 6, empty the plates into the sink and blot on paper towels. Prepare Assay Buffer containing PBS with 4% BSA. Block the plates with 200 μl/well of Pierce Super Block blocking buffer in PBS for 1-2 hr and then wash plates with wash buffer (PBS, 0.05% Tween-20). Blot plates on paper towels. Then add 50 μL/well of diluted Anti-Human IL-6 Monoclonal, Biotin-labeled antibody at 0.50 mg/ml. Make dilutions of IL-6 stock in media (30, 10, 3, 1, 0.3, 0 ng/ml). Add duplicate samples to top row of plate. Cover the plates and incubate for 2 hours at RT on shaker.

[1246] Plates are washed with wash buffer and blotted on paper towels. Dilute EU-labeled Streptavidin 1:1000 in Assay buffer, and add 100 μl/well. Cover the plate and incubate 1 h at RT. Plates are again washed with wash buffer and blotted on paper towels.

[1247] Add 100 μl/well of Enhancement Solution. Shake for 5 minutes. Read the plate on the Wallac DELFIA Fluorometer. Readings from triplicate samples in each assay were tabulated and averaged.

[1248] A positive result in this assay suggests AoSMC cell proliferation and that the albumin fusion protein may be involved in dermal fibroblast proliferation and/or smooth muscle cell proliferation. A positive result also suggests many potential uses of the fusion protein and polynucleotides encoding the albumin fusion protein. For example, inflammation and immune responses, wound healing, and angiogenesis, as detailed throughout this specification. Particularly, fusion proteins may be used in wound healing and dermal regeneration, as well as the promotion of vasculogenesis, both of the blood vessels and lymphatics. The growth of vessels can be used in the treatment of, for example, cardiovascular diseases. Additionally, fusion proteins showing antagonistic activity in this assay may be useful in treating diseases, disorders, and/or conditions which involve angiogenesis by acting as an anti-vascular agent (e.g., anti-angiogenesis). These diseases, disorders, and/or conditions are known in the art and/or are described herein, such as, for example, malignancies, solid tumors, benign tumors, for example hemangiomas, acoustic neuromas, neurofibromas, trachomas, and pyogenic granulomas; artheroscleric plaques; ocular angiogenic diseases, for example, diabetic retinopathy, retinopathy of prematurity, macular degeneration, corneal graft rejection, neovascular glaucoma, retrolental fibroplasia, rubeosis, retinoblastoma, uvietis and Pterygia (abnormal blood vessel growth) of the eye; rheumatoid arthritis; psoriasis; delayed wound healing; endometriosis; vasculogenesis; granulations; hypertrophic scars (keloids); nonunion fractures; scleroderma; trachoma; vascular adhesions; myocardial angiogenesis; coronary collaterals; cerebral collaterals; arterioyenous malformations; ischemic limb angiogenesis; Osler-Webber Syndrome; plaque neovascularization; telangiectasia; hemophiliac joints; angiofibroma; fibromuscular dysplasia; wound granulation; Crohn's disease; and atherosclerosis. Moreover, albumin fusion proteins that act as antagonists in this assay may be useful in treating anti-hyperproliferative diseases and/or anti-inflammatory known in the art and/or described herein.

### Example 40

### Cellular Adhesion Molecule (CAM) Expression on Endothelial Cells

[1249] The recruitment of lymphocytes to areas of inflammation and angiogenesis involves specific receptor-ligand interactions between cell surface adhesion molecules (CAMs) on lymphocytes and the vascular endothelium. The adhesion process, in both normal and pathological settings, follows a multi-step cascade that involves intercellular adhesion molecule-1 (ICAM-1), vascular cell adhesion molecule-1 (VCAM-1), and endothelial leukocyte adhesion molecule-1 (E-selectin) expression on endothelial cells (EC). The expression of these molecules and others on the vascular endothelium determines the efficiency with which leukocytes may adhere to the local vasculature and extravasate into the local tissue during the development of an inflammatory response. The local concentration of cytokines and growth factor participate in the modulation of the expression of these CAMs.

[1250] Briefly, endothelial cells (e.g., Human Umbilical Vein Endothelial cells (HUVECs)) are grown in a standard 96 well plate to confluence, growth medium is removed from the cells and replaced with 100 μl of 199 Medium (10% fetal bovine serum (FBS)). Samples for testing (containing an albumin fusion protein of the invention) and positive or negative controls are added to the plate in triplicate (in 10 μl volumes). Plates are then incubated at 37° C. for either 5 h (selectin and integrin expression) or 24 h (integrin expression only). Plates are aspirated to remove medium and 100 μl of 0.1% paraformaldehyde-PBS (with Ca++ and Mg++) is added to each well. Plates are held at 4° C. for 30 min. Fixative is removed from the wells and wells are washed 1×with PBS (+Ca,Mg)+0.5% BSA and drained. 10 μl of diluted primary antibody is added to the test and control wells. Anti-ICAM-1-Biotin, Anti-VCAM-1-Biotin and Anti-E-selectin-Biotin are used at a concentration of 10 μg/ml (1:10 dilution of 0.1 mg/ml stock antibody). Cells are incubated at 37° C. for 30 min. in a humidified environment. Wells are washed three times with PBS (+Ca,Mg)+0.5% BSA. 20 μl of diluted ExtrAvidin-Alkaline Phosphatase (1:5,000 dilution, referred to herein as the working dilution) are added to each well and incubated at 37° C. for 30 min. Wells are washed three times with PBS (+Ca,Mg)+0.5% BSA. Dissolve 1 tablet of p-Nitrophenol Phosphate pNPP per 5 ml of glycine buffer (pH 10.4). 100 μl of pNPP substrate in glycine buffer is added to each test well. Standard wells in triplicate are prepared from the working dilution of the ExtrAvidin-Alkaline Phosphotase in glycine buffer: 1:5,000 (10⁰)>10^{-0.5}>10⁻¹>10^{-1.5}. 5 μl of each dilution is added to triplicate wells and the resulting AP content in each well is 5.50 ng, 1.74 ng, 0.55 ng, 0.18 ng. 100 μl of pNNP reagent is then added to each of the standard wells. The plate is incubated at 37° C. for 4 h. A volume of 50 μl of 3M NaOH is added to all wells. The plate is read on a plate reader at 405 nm using the background subtraction option on blank wells filled with glycine buffer only. Additionally, the template is set up to indicate the concentration of AP-conjugate in each standard well [5.50 ng; 1.74 ng; 0.55 ng; 0.18 ng]. Results are indicated as amount of bound AP-conjugate in each sample.

### Example 41

### Alamar Blue Endothelial Cells Proliferation Assay

[1251] This assay may be used to quantitatively determine protein mediated inhibition of bFGF-induced proliferation of Bovine Lymphatic Endothelial Cells (LECs), Bovine Aortic Endothelial Cells (BAECs) or Human Microvascular Uterine Myometrial Cells (UTMECs). This assay incorporates a fluorometric growth indicator based on detection of metabolic activity. A standard Alamar Blue Proliferation Assay is prepared in EGM-2MV with 10 ng/ml of bFGF added as a source of endothelial cell stimulation. This assay may be used with a variety of endothelial cells with slight changes in growth medium and cell concentration. Dilutions of protein batches to be tested are diluted as appropriate. Serum-free medium (GIBCO SFM) without bFGF is used as a non-stimulated control and Angiostatin or TSP-1 are included as a known inhibitory controls.

[1252] Briefly, LEC, BAECs or UTMECs are seeded in growth media at a density of 5000 to 2000 cells/well in a 96 well plate and placed at 37 degreesC overnight. After the overnight incubation of the cells, the growth media is removed and replaced with GIBCO EC-SFM. The cells are treated with the appropriate dilutions of an albumin fusion protein of the invention or control protein sample(s) (prepared in SFM) in triplicate wells with additional bFGF to a concentration of 10 ng/ml. Once the cells have been treated with the samples, the plate(s) is/are placed back in the 37° C. incubator for three days. After three days 10 ml of stock alamar blue (Biosource Cat# DAL1100) is added to each well and the plate(s) is/are placed back in the 37° C. incubator for four hours. The plate(s) are then read at 530 nm excitation and 590 nm emission using the CytoFluor fluorescence reader. Direct output is recorded in relative fluorescence units.

[1253] Alamar blue is an oxidation-reduction indicator that both fluoresces and changes color in response to chemical reduction of growth medium resulting from cell growth. As cells grow in culture, innate metabolic activity results in a chemical reduction of the immediate surrounding environment. Reduction related to growth causes the indicator to change from oxidized (non-fluorescent blue) form to reduced (fluorescent red) form (i.e., stimulated proliferation will produce a stronger signal and inhibited proliferation will produce a weaker signal and the total signal is proportional to the total number of cells as well as their metabolic activity). The background level of activity is observed with the starvation medium alone. This is compared to the output observed from the positive control samples (bFGF in growth medium) and protein dilutions.

### Example 42

### Detection of Inhibition of a Mixed Lymphocyte Reaction

[1254] This assay can be used to detect and evaluate inhibition of a Mixed Lymphocyte Reaction (MLR) by fusion proteins of the invention. Inhibition of a MLR may be due to a direct effect on cell proliferation and viability, modulation of costimulatory molecules on interacting cells, modulation of adhesiveness between lymphocytes and accessory cells, or modulation of cytokine production by accessory cells. Multiple cells may be targeted by the albumin fusion proteins that inhibit MLR since the peripheral blood mononuclear fraction used in this assay includes T, B and natural killer lymphocytes, as well as monocytes and dendritic cells.

[1255] Albumin fusion proteins of the invention found to inhibit the MLR may find application in diseases associated with lymphocyte and monocyte activation or proliferation. These include, but are not limited to, diseases such as asthma, arthritis, diabetes, inflammatory skin conditions, psoriasis, eczema, systemic lupus erythematosus, multiple sclerosis, glomerulonephritis, inflammatory bowel disease, crohn's disease, ulcerative colitis, arteriosclerosis, cirrhosis, graft vs. host disease, host vs. graft disease, hepatitis, leukemia and lymphoma.

[1256] Briefly, PBMCs from human donors are purified by density gradient centrifugation using Lymphocyte Separation Medium (LSM®, density 1.0770 g/ml, Organon Teknika Corporation, West Chester, Pa.). PBMCs from two donors are adjusted to 2×10⁶ cells/ml in RPMI-1640 (Life Technologies, Grand Island, N.Y.) supplemented with 10% FCS and 2 mM glutamine. PBMCs from a third donor is adjusted to 2×10⁵ cells/ml. Fifty microliters of PBMCs from each donor is added to wells of a 96-well round bottom microtiter plate. Dilutions of the fusion protein test material (50 μl) is added in triplicate to microtiter wells. Test samples (of the protein of interest) are added for final dilution of 1:4; rhuIL-2 (R&D Systems, Minneapolis, Minn., catalog number 202-IL) is added to a final concentration of 1 μg/ml; anti-CD4 mAb (R&D Systems, clone 34930.11, catalog number MAB379) is added to a final concentration of 10 μg/ml. Cells are cultured for 7-8 days at 37° C. in 5% CO₂, and 1 μC of [³H] thymidine is added to wells for the last 16 hrs of culture. Cells are harvested and thymidine incorporation determined using a Packard TopCount. Data is expressed as the mean and standard deviation of triplicate determinations.

[1257] Samples of the fusion protein of interest are screened in separate experiments and compared to the negative control treatment, anti-CD4 mAb, which inhibits proliferation of lymphocytes and the positive control treatment, IL-2 (either as recombinant material or supernatant), which enhances proliferation of lymphocytes.

### Example 43

### Assays for Protease Activity

[1258] The following assay may be used to assess protease activity of an albumin fusion protein of the invention.

[1259] Gelatin and casein zymography are performed essentially as described (Heusen et al., Anal Biochem., 102:196-202 (1980); Wilson et al., Journal of Urology, 149:653-658 (1993)). Samples are run on 10% polyacryamide/0.1% SDS gels containing 1% gelain orcasein, soaked in 2.5% triton at room temperature for 1 hour, and in 0.1M glycine, pH 8.3 at 37° C. 5 to 16 hours. After staining in amido black areas of proteolysis apear as clear areas agains the blue-black background. Trypsin (Sigma T8642) is used as a positive control.

[1260] Protease activity is also determined by monitoring the cleavage of n-a-benzoyl-L-arginine ethyl ester (BAEE) (Sigma B-4500. Reactions are set up in (25 mMNaPO₄, 1 mM EDTA, and 1 mM BAEE), pH 7.5. Samples are added and the change in adsorbance at 260 nm is monitored on the Beckman DU-6 spectrophotometer in the time-drive mode. Trypsin is used as a positive control.

[1261] Additional assays based upon the release of acid-soluble peptides from casein or hemoglobin measured as adsorbance at 280 nm or calorimetrically using the Folin method are performed as described in Bergmeyer, et al., Methods of Enzymatic Analysis, 5 (1984). Other assays involve the solubilization of chromogenic substrates (Ward, Applied Science, 251-317 (1983)).

### Example 44

### Identifying Serine Protease Substrate Specificity

[1262] Methods known in the art or described herein may be used to determine the substrate specificity of the albumin fusion proteins of the present invention having serine protease activity. A preferred method of determining substrate specificity is by the use of positional scanning synthetic combinatorial libraries as described in GB 2 324 529 (incorporated herein in its entirety).

### Example 45

### Ligand Binding Assays

[1263] The following assay may be used to assess ligand binding activity of an albumin fusion protein of the invention.

[1264] Ligand binding assays provide a direct method for ascertaining receptor pharmacology and are adaptable to a high throughput format. The purified ligand for an albumin fusion protein of the invention is radiolabeled to high specific activity (50-2000 Ci/mmol) for binding studies. A determination is then made that the process of radiolabeling does not diminish the activity of the ligand towards the fusion protein. Assay conditions for buffers, ions, pH and other modulators such as nucleotides are optimized to establish a workable signal to noise ratio for both membrane and whole cell polypeptide sources. For these assays, specific polypeptide binding is defined as total associated radioactivity minus the radioactivity measured in the presence of an excess of unlabeled competing ligand. Where possible, more than one competing ligand is used to define residual nonspecific binding.

### Example 46

### Functional Assay in Xenopus Oocytes

[1265] Capped RNA transcripts from linearized plasmid templates encoding an albumin fusion protein of the invention is synthesized in vitro with RNA polymerases in accordance with standard procedures. In vitro transcripts are suspended in water at a final concentration of 0.2 mg/ml. Ovarian lobes are removed from adult female toads, Stage V defolliculated oocytes are obtained, and RNA transcripts (10 ng/oocytc) are injected in a 50 nl bolus using a microinjection apparatus. Two electrode voltage clamps are used to measure the currents from individual Xenopus oocytes in response fusion protein and polypeptide agonist exposure. Recordings are made in Ca2+ free Barth's medium at room temperature. The Xenopus system can be used to screen known ligands and tissue/cell extracts for activating ligands.

### Example 47

### Microphysiometric Assays

[1266] Activation of a wide variety of secondary messenger systems results in extrusion of small amounts of acid from a cell. The acid formed is largely as a result of the increased metabolic activity required to fuel the intracellular signaling process. The pH changes in the media surrounding the cell are very small but are detectable by the CYTOSENSOR microphysiometer (Molecular Devices Ltd., Menlo Park, Calif.). The CYTOSENSOR is thus capable of detecting the ability of an albumin fusion protein of the invention to activate secondary messengers that are coupled to an energy utilizing intracellular signaling pathway.

### Example 48

### Extract/Cell Supernatant Screening

[1267] A large number of mammalian receptors exist for which there remains, as yet, no cognate activating ligand (agonist). Thus, active ligands for these receptors may not be included within the ligands banks as identified to date. Accordingly, the albumin fusion proteins of the invention can also be functionally screened (using calcium, cAMP, microphysiometer, oocyte electrophysiology, etc., functional screens) against tissue extracts to identify natural ligands for the Therapeutic protein portion and/or albumin protein portion of an albumin fusion protein of the invention. Extracts that produce positive functional responses can be sequentially subfractionated until an activating ligand is isolated and identified.

### Example 49

### ATP-Binding Assay

[1268] The following assay may be used to assess ATP-binding activity of fusion proteins of the invention.

[1269] ATP-binding activity of an albumin fusion protein of the invention may be detected using the ATP-binding assay described in U.S. Pat. No. 5,858,719, which is herein incorporated by reference in its entirety. Briefly, ATP-binding to an albumin fusion protein of the invention is measured via photoaffinity labeling with 8-azido-ATP in a competition assay. Reaction mixtures containing 1 mg/ml of ABC transport protein are incubated with varying concentrations of ATP, or the non-hydrolyzable ATP analog adenyl-5′-imidodiphosphate for 10 minutes at 4° C. A mixture of 8-azido-ATP (Sigma Chem. Corp., St. Louis, Mo.) plus 8-azido-ATP (³²P-ATP) (5 mCi/μmol, ICN, Irvine Calif.) is added to a final concentration of 100 μM and 0.5 ml aliquots are placed in the wells of a porcelain spot plate on ice. The plate is irradiated using a short wave 254 nm UV lamp at a distance of 2.5 cm from the plate for two one-minute intervals with a one-minute cooling interval in between. The reaction is stopped by addition of dithiothreitol to a final concentration of 2 mM. The incubations are subjected to SDS-PAGE electrophoresis, dried, and autoradiographed. Protein bands corresponding to the albumin fusion proteins of the invention are excised, and the radioactivity quantified. A decrease in radioactivity with increasing ATP or adenly-5′-imidodiphosphate provides a measure of ATP affinity to the fusion protein.

### Example 50

### Phosphorylation Assay

[1270] In order to assay for phosphorylation activity of an albumin fusion protein of the invention, a phosphorylation assay as described in U.S. Pat. No. 5,958,405 (which is herein incorporated by reference) is utilized. Briefly, phosphorylation activity may be measured by phosphorylation of a protein substrate using gamma-labeled ³²P-ATP and quantitation of the incorporated radioactivity using a gamma radioisotope counter. The fusion portein of the invention is incubated with the protein substrate, ³²P-ATP, and a kinase buffer. The incorporated into the substrate is then separated from free ³²P-ATP by electrophoresis, and the incorporated ³²P is counted and compared to a negative control. Radioactivity counts above the negative control are indicative of phosphorylation activity of the fusion protein.

### Example 51

### Detection of Phosphorylation Activity (Activation) of an Albumin Fusion Protein of the Invention in the Presence of Polypeptide Ligands

[1271] Methods known in the art or described herein may be used to determine the phosphorylation activity of an albumin fusion protein of the invention. A preferred method of determining phosphorylation activity is by the use of the tyrosine phosphorylation assay as described in U.S. Pat. No. 5,817,471 (incorporated herein by reference).

### Example 52

### Identification of Signal Transduction Proteins that Interact with an Albumin Fusion Protein of the Present Invention

[1272] Albumin fusion proteins of the invention may serve as research tools for the identification, characterization and purification of signal transduction pathway proteins or receptor proteins. Briefly, a labeled fusion protein of the invention is useful as a reagent for the purification of molecules with which it interacts. In one embodiment of affinity purification, an albumin fusion protein of the invention is covalently coupled to a chromatography column. Cell-free extract derived from putative target cells, such as carcinoma tissues, is passed over the column, and molecules with appropriate affinity bind to the albumin fusion protein. The protein complex is recovered from the column, dissociated, and the recovered molecule subjected to N-terminal protein sequencing. This amino acid sequence is then used to identify the captured molecule or to design degenerate oligonucleotide probes for cloning the relevant gene from an appropriate cDNA library.

### Example 53

### IL-6 Bioassay

[1273] A variety of assays are known in the art for testing the proliferative effects of an albumin fusion protein of the invention. For example, one such asssay is the IL-6 Bioassay as described by Marz et al. (Proc. Natl. Acad. Sci., U.S.A., 95:3251-56 (1998), which is herein incorporated by reference). After 68 hrs. at 37° C., the number of viable cells is measured by adding the tetrazolium salt thiazolyl blue (MTT) and incubating for a further 4 hrs. at 37° C. B9 cells are lysed by SDS and optical density is measured at 570 nm. Controls containing IL-6 (positive) and no cytokine (negative) are Briefly, IL-6 dependent B9 murine cells are washed three times in IL-6 free medium and plated at a concentration of 5,000 cells per well in 50 μl, and 50 μl of fusion protein of the invention is added utilized. Enhanced proliferation in the test sample(s) (containing an albumin fusion protein of the invention) relative to the negative control is indicative of proliferative effects mediated by the fusion protein.

### Example 54

### Support of Chicken Embryo Neuron Survival

[1274] To test whether sympathetic neuronal cell viability is supported by an albumin fusion protein of the invention, the chicken embryo neuronal survival assay of Senaldi et al may be utilized (Proc. Natl. Acad. Sci., U.S.A., 96:11458-63 (1998), which is herein incorporated by reference). Briefly, motor and sympathetic neurons are isolated from chicken embryos, resuspended in L15 medium (with 10% FCS, glucose, sodium selenite, progesterone, conalbumin, putrescine, and insulin; Life Technologies, Rockville, Md.) and Dulbecco's modified Eagles medium [with 10% FCS, glutamine, penicillin, and 25 mM Hepes buffer (pH 7.2); Life Technologies, Rockville, Md.], respectively, and incubated at 37° C. in 5% CO₂ in the presence of different concentrations of the purified fusion protein of the invention, as well as a negative control lacking any cytokine. After 3 days, neuron survival is determined by evaluation of cellular morphology, and through the use of the colorimetric assay of Mosmann (Mosmann, T., J. Immunol. Methods, 65:55-63 (1983)). Enhanced neuronal cell viability as compared to the controls lacking cytokine is indicative of the ability of the albumin fusion protein to enhance the survival of neuronal cells.

### Example 55

### Assay for Phosphatase Activity

[1275] The following assay may be used to assess serine/threonine phosphatase (PTPase) activity of an albumin fusion protein of the invention.

[1276] In order to assay for serine/threonine phosphatase (PTPase) activity, assays can be utilized which are widely known to those skilled in the art. For example, the serine/threonine phosphatase (PSPase) activity of an albumin fusion protein of the invention may be measured using a PSPase assay kit from New England Biolabs, Inc. Myelin basic protein (MyBP), a substrate for PSPase, is phosphorylated on serine and threonine residues with cAMP-dependent Protein Kinase in the presence of [³²P]ATP. Protein serine/threonine phosphatase activity is then determined by measuring the release of inorganic phosphate from 32P-labeled MyBP.

### Example 56

### Interaction of Serine/Threonine Phosphatases with Other Proteins

[1277] Fusion protein of the invention having serine/threonine phosphatase activity (e.g., as determined in Example 55) are useful, for example, as research tools for the identification, characterization and purification of additional interacting proteins or receptor proteins, or other signal transduction pathway proteins. Briefly, a labeled fusion protein of the invention is useful as a reagent for the purification of molecules with which it interacts. In one embodiment of affinity purification, an albumin fusion protein of the invention is covalently coupled to a chromatography column. Cell-free extract derived from putative target cells, such as neural or liver cells, is passed over the column, and molecules with appropriate affinity bind to the fusion protein. The fusion protein-complex is recovered from the column, dissociated, and the recovered molecule subjected to N-terminal protein sequencing. This amino acid sequence is then used to identify the captured molecule or to design degenerate oligonucleotide probes for cloning the relevant gene from an appropriate cDNA library.

### Example 57

### Assaying for Heparanase Activity

[1278] There a numerous assays known in the art that may be employed to assay for heparanase activity of an albumin fusion protein of the invention. In one example, heparanase activity of an albumin fusion protein of the invention, is assayed as described by Vlodavsky et al., (Vlodavsky et al., Nat. Med., 5:793-802 (1999)). Briefly, cell lysates, conditioned media, intact cells (1×10⁶ cells per 35-mm dish), cell culture supernatant, or purified fusion protein are incubated for 18 hrs at 37° C., pH 6.2-6.6, with ³⁵S-labeled ECM or soluble ECM derived peak I proteoglycans. The incubation medium is centrifuged and the supernatant is analyzed by gel filtration on a Sepharose CL-6B column (0.9×30 cm). Fractions are eluted with PBS and their radioactivity is measured. Degradation fragments of heparan sulfate side chains are eluted from Sepharose 6B at 0.5<Kₐᵥ<0.8 (peak II). Each experiment is done at least three times. Degradation fragments corresponding to “peak II,” as described by Vlodavsky et al., is indicative of the activity of an albumin fusion protein of the invention in cleaving heparan sulfate.

### Example 58

### Immobilization of Biomolecules

[1279] This example provides a method for the stabilization of an albumin fusion protein of the invention in non-host cell lipid bilayer constucts (see, e.g., Bieri et al., Nature Biotech 17:1105-1108 (1999), hereby incorporated by reference in its entirety herein) which can be adapted for the study of fusion proteins of the invention in the various functional assays described above. Briefly, carbohydrate-specific chemistry for biotinylation is used to confine a biotin tag to an albumin fusion protein of the invention, thus allowing uniform orientation upon immobilization. A 50 uM solution of an albumin fusion protein of the invention in washed membranes is incubated with 20 mM NaIO4 and 1.5 mg/ml (4 mM) BACH or 2 mg/ml (7.5 mM) biotin-hydrazide for 1 hr at room temperature (reaction volume, 150 ul). Then the sample is dialyzed (Pierce Slidealizer Cassett, 10 kDa cutoff; Pierce Chemical Co., Rockford Ill.) at 4C first for 5 h, exchanging the buffer after each hour, and finally for 12 h against 500 ml buffer R (0.15 M NaCl, 1 mM MgCl2, 10 mM sodium phosphate, pH 7). Just before addition into a cuvette, the sample is diluted 1:5 in buffer ROG50 (Buffer R supplemented with 50 mM octylglucoside).

### Example 59

### Assays for Metalloproteinase Activity

[1280] Metalloproteinases are peptide hydrolases which use metal ions, such as Zn²⁺, as the catalytic mechanism. Metalloproteinase activity of an albumin fusion protein of the present invention can be assayed according to methods known in the art. The following exemplary methods are provided:

[1281] Proteolysis of Alpha-2-Macroglobulin

[1282] To confirm protease activity, a purified fusion protein of the invention is mixed with the substrate alpha-2-macroglobulin (0.2 unit/ml; Boehringer Mannheim, Germany) in 1×assay buffer (50 mM HEPES, pH 7.5, 0.2 M NaCl, 10 mM CaCl₂, 25 μM ZnCl₂ and 0.05% Brij-35) and incubated at 37° C. for 1-5 days. Trypsin is used as positive control. Negative controls contain only alpha-2-macroglobulin in assay buffer. The samples are collected and boiled in SDS-PAGE sample buffer containing 5% 2-mercaptoethanol for 5-min, then loaded onto 8% SDS-polyacrylamide gel. After electrophoresis the proteins are visualized by silver staining. Proteolysis is evident by the appearance of lower molecular weight bands as compared to the negative control.

[1283] Inhibition of Alpha-2-Macroglobulin Proteolysis by Inhibitors of Metalloproteinases

[1284] Known metalloproteinase inhibitors (metal chelators (EDTA, EGTA, AND HgCl₂), peptide metalloproteinase inhibitors (TIMP-1 and TIMP-2), and commercial small molecule MMP inhibitors) may also be used to characterize the proteolytic activity of an albumin fusion protein of the invention. Three synthetic MMP inhibitors that may be used are: MMP inhibitor I, [IC₅₀=1.0 μM against MMP-1 and MMP-8; IC₅₀=30 μM against MMP-9; IC₅₀=150 μM against MMP-3]; MMP-3 (stromelysin-1) inhibitor I [IC₅₀=5 μM against MMP-3], and MMP-3 inhibitor II [Kₗ=130 nM against MMP-3]; inhibitors available through Calbiochem, catalog # 444250, 444218, and 444225, respectively). Briefly, different concentrations of the small molecule MMP inhibitors are mixed with a purified fusion protein of the invention (50 μg/ml) in 22.9 μl of 1×HEPES buffer (50 mM HEPES, pH 7.5, 0.2 M NaCl, 10 mM CaCl₂, 25 μM ZnCl₂ and 0.05%Brij-35) and incubated at room temperature (24° C.) for 2-hr, then 7.1 μl of substrate alpha-2-macroglobulin (0.2 unit/ml) is added and incubated at 37° C. for 20-hr. The reactions are stopped by adding 4×sample buffer and boiled immediately for 5 minutes. After SDS-PAGE, the protein bands are visualized by silver stain.

[1285] Synthetic Fluorogenic Peptide Substrates Cleavage Assay

[1286] The substrate specificity for fusion proteins of the invention with demonstrated metalloproteinase activity may be determined using techniques knonw in the art, such as using synthetic fluorogenic peptide substrates (purchased from BACHEM Bioscience Inc). Test substrates include, M-1985, M-2225, M-2105, M-2110, and M-2255. The first four are MMP substrates and the last one is a substrate of tumor necrosis factor-α (TNF-α) converting enzyme (TACE). These substrastes are preferably prepared in 1:1 dimethyl sulfoxide (DMSO) and water. The stock solutions are 50-500 μM. Fluorescent assays are performed by using a Perkin Elmer LS 50B luminescence spectrometer equipped with a constant temperature water bath. The excitation λ is 328 nm and the emission k is 393 nm. Briefly, the assay is carried out by incubating 176 μl 1×HEPES buffer (0.2 M NaCl, 10 mM CaCl₂, 0.05% Brij-35 and 50 mM HEPES, pH 7.5) with 4 μl of substrate solution (50 μM) at 25° C. for 15 minutes, and then adding 20 μl of a purified fusion protein of the invention into the assay cuvett. The final concentration of substrate is 1 μM. Initial hydrolysis rates are monitored for 30-min.

### Example 60

### Identification and Cloning of VH and VL Domains

[1287] One method to identfy and clone VH and VL domains from cell lines expressing a particular antibody is to perform PCR with VH and VL specific primers on cDNA made from the antibody expressing cell lines. Briefly, RNA is isolated from the cell lines and used as a template for RT-PCR designed to amplify the VH and VL domains of the antibodies expressed by the EBV cell lines. Cells may be lysed in the TRIzol® reagent (Life Technologies, Rockville. MD) and extracted with one fifth volume of chloroform. After addition of chloroform, the solution is allowed to incubate at room temperature for 10 minutes, and the centrifuged at 14,000 rpm for 15 minutes at 4° C. in a tabletop centrifuge. The supernatant is collected and RNA is precipitated using an equal volume of isopropanol. Precipitated RNA is pelleted by centrifuging at 14,000 rpm for 15 minutes at 4° C. in a tabletop centrifuge. Following centrifugation, the supernatant is discarded and washed with 75% ethanol. Follwing washing, the RNA is centrifuged again at 800 rpm for 5 minutes at 4° C. The supernatant is discarded and the pellet allowed to air dry. RNA is the dissolved in DEPC water and heated to 60° C. for 10 minutes. Quantities of RNA can determined using optical density measurements.

[1288] cDNA may be synthesized, according to methods well-known in the art, from 1.5-2.5 micrograms of RNA using reverse transciptase and random hexamer primers. cDNA is then used as a template for PCR amplification of VH and VL domains. Primers used to amplify VH and VL genes are shown in Table 3. Typically a PCR reaction makes use of a single 5′ primer and a single 3′ primer. Sometimes, when the amount of available RNA template is limiting, or for greater efficiency, groups of 5′ and/or 3′ primers may be used. For example, sometimes all five VH-5′ primers and all JH3′ primers are used in a single PCR reaction. The PCR reaction is carried out in a 50 microliter volume containing 1×PCR buffer, 2 mM of each dNTP, 0.7 units of High Fidelity Taq polymerse, 5′ primer mix, 3′ primer mix and 7.5 microliters of cDNA. The 5′ and 3′ primer mix of both VH and VL can be made by pooling together 22 pmole and 28 pmole, respectively, of each of the individual primers. PCR conditions are: 96° C. for 5 minutes; followed by 25 cycles of 94° C. for 1 minute, 50° C. for 1 minute, and 72° C. for 1 minute; followed by an extension cycle of 72° C. for 10 minutes. After the reaction is completed, sample tubes are stored 4° C.

TABLE 3

Primer Sequences Used to Amplify VH and VL
domains.

| | | |
|---|---|---|
| Primer name | SEQ ID NO | Primer Sequence (5′-3′) |

VH Primers

| | | |
|---|---|---|
| Hu VH1-5′ | 36 | CAGGTGCAGCTGGTGCAGTCTGG |
| Hu VH2-5′ | 37 | CAGGTCAACTTAAGGGAGTCTGG |
| Hu VH3-5′ | 38 | GAGGTGCAGCTGGTGGAGTCTGG |
| Hu VH4-5′ | 39 | CAGGTGCAGCTGCAGGAGTCGGG |
| Hu VH5-5′ | 40 | GAGGTGCAGCTGTTGCAGTCTGC |
| Hu VH6-5′ | 41 | CAGGTACAGCTGCAGCAGTCAGG |
| Hu JH1,2-5′ | 42 | TGAGGAGACGGTGACCAGGGTGCC |
| Hu JH3-5′ | 43 | TGAAGAGACGGTGACCATTGTCCC |
| Hu JH4,5-5′ | 44 | TGAGGAGACGGTGACCAGGGTTCC |
| Hu JH6-5′ | 45 | TGAGGAGACGGTGACCGTGGTCCC |

VL Primers

| | | |
|---|---|---|
| Hu Vkappa1-5′ | 46 | GACATCCAGATGACCCAGTCTCC |
| Hu Vkappa2a-5′ | 47 | GATGTTGTGATGACTCAGTCTCC |
| Hu Vkappa2b-5′ | 48 | GATATTGTGATGACTCAGTCTCC |
| Hu Vkappa3-5′ | 49 | GAAATTGTGTTGACGCAGTCTCC |
| Hu Vkappa4-5′ | 50 | GACATCGTGATGACCCAGTCTCC |
| Hu Vkappa5-5′ | 51 | GAAACGACACTCACGCAGTCTCC |
| Hu Vkappa6-5′ | 52 | GAAATTGTGCTGACTCAGTCTCC |
| Hu Vlambda1-5′ | 53 | CAGTCTGTGTTGACGCAGCCGCC |
| Hu Vlambda2-5′ | 54 | CAGTCTGCCCTGACTCAGCCTGC |
| Hu Vlambda3-5′ | 55 | TCCTATGTGCTGACTCAGCCACC |
| Hu Vlambda3b-5′ | 56 | TCTTCTGAGCTGACTCAGGACCC |
| Hu Vlambda4-5′ | 57 | CACGTTATACTGACTCAACCGCC |
| Hu Vlambda5-5′ | 58 | CAGGCTGTGCTCACTCAGCCGTC |
| Hu Vlambda6-5′ | 59 | AATTTTATGCTGACTCAGCCCCA |
| Hu Jkappa1-3′ | 60 | ACGTTTGATTTCCACCTTGGTCCC |
| Hu Jkappa2-3′ | 61 | ACGTTTGATCTCCAGCTTGGTCCC |
| Hu Jkappa3-3′ | 62 | ACGTTTGATATCCACTTTGGTCCC |
| Hu Jkappa4-3′ | 63 | ACGTTTGATCTCCACCTTGGTCCC |
| Hu Jkappa5-3′ | 64 | ACGTTTAATCTCCAGTCGTGTCCC |
| Hu Jlambda2-3′ | 65 | CAGTCTGTGTTGACGCAGCCGCC |
| Hu Jlambda2-3′ | 66 | CAGTCTGCCCTGACTCAGCCTGC |
| Hu Jlambda3-−3′ | 67 | TCCTATGTGCTGACTCAGCCACC |
| Hu Jlambda3b-3′ | 68 | TCTTCTGAGCTGACTCAGGACCC |
| Hu Jlambda4-3′ | 69 | CACGTTATACTGACTCAACCGCC |
| Hu Jlambda5-3′ | 70 | CAGGCTGTGCTCACTCAGCCGTC |
| Hu Jlambda6-3′ | 71 | AATTTTATGCTGACTCAGCCCCA |

[1289] PCR samples are then electrophoresed on a 1.3% agarose gel. DNA bands of the expected sizes (˜506 base pairs for VH domains, and 344 base pairs for VL domains) can be cut out of the gel and purified using methods well known in the art. Purified PCR products can be ligated into a PCR cloning vector (TA vector from Invitrogen Inc., Carlsbad, Calif.). Individual cloned PCR products can be isolated after transfection of E. coli and blue/white color selection. Cloned PCR products may then be sequenced using methods commonly known in the art.

[1290] The PCR bands containing the VH domain and the VL domains can also be used to create full-length Ig expression vectors. VH and VL domains can be cloned into vectors containing the nucleotide sequences of a heavy (e.g., human IgG1 or human IgG4) or light chain (human kappa or human lambda) constant regions such that a complete heavy or light chain molecule could be expressed from these vectors when transfected into an appropriate host cell. Further, when cloned heavy and light chains are both expressed in one cell line (from either one or two vectors), they can assemble into a complete functional antibody molecule that is secreted into the cell culture medium. Methods using polynucleotides encoding VH and VL antibody domain to generate expression vectors that encode complete antibody molecules are well known within the art.

[1291] It will be clear that the invention may be practiced otherwise than as particularly described in the foregoing description and examples. Numerous modifications and variations of the present invention are possible in light of the above teachings and, therefore, are within the scope of the appended claims.

[1292] The entire disclosure of each document cited (including patents, patent applications, patent publications, journal articles, abstracts, laboratory manuals, books, or other disclosures) as well as information available through Identifiers specific to databases such as GenBank, GeneSeq, or the CAS Registry, referred to in this application are herein incorporated by reference in their entirety. The specification and sequence listing of each of the following U.S. applications are herein incorporated by reference in their entirety:

| ApplNumber | File Date |
|---|---|
| 60/047,599 | 23-May-1997 |
| 60/043,576 | 11-Apr-1997 |
| 60/043,578 | 11-Apr-1997 |
| 60/043,568 | 11-Apr-1997 |
| 60/040,162 | 07-Mar-1997 |
| 60/047,601 | 23-May-1997 |
| 60/047,632 | 23-May-1997 |
| 60/047,595 | 23-May-1997 |
| 60/056,845 | 22-Aug-1997 |
| 60/056,664 | 22-Aug-1997 |
| 60/056,892 | 22-Aug-1997 |
| 60/056,632 | 22-Aug-1997 |
| 60/043,580 | 11-Apr-1997 |
| 60/043,314 | 11-Apr-1997 |
| 60/056,631 | 22-Aug-1997 |
| 60/043,674 | 11-Apr-1997 |
| 60/043,670 | 11-Apr-1997 |
| 60/043,569 | 11-Apr-1997 |
| 60/043,671 | 11-Apr-1997 |
| 60/047,596 | 23-May-1997 |
| 60/056,876 | 22-Aug-1997 |
| 60/047,612 | 23-May-1997 |
| 60/047,588 | 23-May-1997 |
| 60/056,864 | 22-Aug-1997 |
| 60/043,311 | 11-Apr-1997 |
| 60/040,333 | 07-Mar-1997 |
| 60/043,312 | 11-Apr-1997 |
| 60/056,909 | 22-Aug-1997 |
| 60/056,910 | 22-Aug-1997 |
| 60/056,636 | 22-Aug-1997 |
| 60/047,586 | 23-May-1997 |
| 60/043,315 | 11-Apr-1997 |
| 60/043,669 | 11-Apr-1997 |
| 60/043,672 | 11-Apr-1997 |
| 60/047,585 | 23-May-1997 |
| 60/047,598 | 23-May-1997 |
| 60/056,874 | 22-Aug-1997 |
| 60/047,582 | 23-May-1997 |
| 60/056,881 | 22-Aug-1997 |
| 60/043,313 | 11-Apr-1997 |
| 60/047,613 | 23-May-1997 |
| 60/038,621 | 07-Mar-1997 |
| 60/040,161 | 07-Mar-1997 |
| 60/056,911 | 22-Aug-1997 |
| 60/047,492 | 23-May-1997 |
| 60/047,584 | 23-May-1997 |
| 60/047,500 | 23-May-1997 |
| 60/047,587 | 23-May-1997 |
| 60/056,880 | 22-Aug-1997 |
| 60/056,894 | 22-Aug-1997 |
| 60/056,879 | 22-Aug-1997 |
| 60/047,590 | 23-May-1997 |
| 60/047,581 | 23-May-1997 |
| 60/047,592 | 23-May-1997 |
| 60/056,637 | 22-Aug-1997 |
| 60/047,503 | 23-May-1997 |
| 60/056,903 | 22-Aug-1997 |
| 60/056,888 | 22-Aug-1997 |
| 60/040,626 | 07-Mar-1997 |
| 60/056,882 | 22-Aug-1997 |
| 60/056,875 | 22-Aug-1997 |
| 60/047,501 | 23-May-1997 |
| 60/056,878 | 22-Aug-1997 |
| 60/056,662 | 22-Aug-1997 |
| 60/056,872 | 22-Aug-1997 |
| 60/047,589 | 23-May-1997 |
| 60/056,884 | 22-Aug-1997 |
| 60/056,862 | 22-Aug-1997 |
| 60/040,334 | 07-Mar-1997 |
| 60/047,583 | 23-May-1997 |
| 60/047,618 | 23-May-1997 |
| 60/047,594 | 23-May-1997 |
| 60/047,617 | 23-May-1997 |
| 60/047,633 | 23-May-1997 |
| 60/047,593 | 23-May-1997 |
| 60/056,630 | 22-Aug-1997 |
| 60/047,502 | 23-May-1997 |
| 60/040,336 | 07-Mar-1997 |
| 60/056,887 | 22-Aug-1997 |
| 60/056,893 | 22-Aug-1997 |
| 60/056,889 | 22-Aug-1997 |
| 60/047,614 | 23-May-1997 |
| 60/047,615 | 23-May-1997 |
| 60/040,163 | 07-Mar-1997 |
| 60/047,597 | 23-May-1997 |
| 60/056,877 | 22-Aug-1997 |
| 60/047,600 | 23-May-1997 |
| 60/056,908 | 22-Aug-1997 |
| 60/056,886 | 22-Aug-1997 |
| 60/040,710 | 14-Mar-1997 |
| 60/050,934 | 30-May-1997 |
| 60/048,100 | 30-May-1997 |
| 60/048,189 | 30-May-1997 |
| 60/048,357 | 30-May-1997 |
| 60/040,762 | 14-Mar-1997 |
| 60/041,277 | 21-Mar-1997 |
| 60/048,135 | 30-May-1997 |
| 60/048,350 | 30-May-1997 |
| 60/048,094 | 30-May-1997 |
| 60/048,188 | 30-May-1997 |
| 60/048,099 | 30-May-1997 |
| 60/050,937 | 30-May-1997 |
| 60/042,344 | 21-Mar-1997 |
| 60/048,352 | 30-May-1997 |
| 60/048,187 | 30-May-1997 |
| 60/048,186 | 30-May-1997 |
| 60/048,095 | 30-May-1997 |
| 60/048,131 | 30-May-1997 |
| 60/048,069 | 30-May-1997 |
| 60/041,276 | 21-Mar-1997 |
| 60/048,096 | 30-May-1997 |
| 60/048,154 | 30-May-1997 |
| 60/048,160 | 30-May-1997 |
| 60/041,281 | 21-Mar-1997 |
| 60/048,355 | 30-May-1997 |
| 60/048,351 | 30-May-1997 |
| 60/048,068 | 30-May-1997 |
| 60/042,825 | 08-Apr-1997 |
| 60/048,184 | 30-May-1997 |
| 60/042,727 | 08-Apr-1997 |
| 60/048,070 | 30-May-1997 |
| 60/042,728 | 08-Apr-1997 |
| 60/042,726 | 08-Apr-1997 |
| 60/042,754 | 08-Apr-1997 |
| 60/048,190 | 30-May-1997 |
| 60/044,039 | 30-May-1997 |
| 60/048,093 | 30-May-1997 |
| 60/057,645 | 05-Sep-1997 |
| 60/049,375 | 06-Jun-1997 |
| 60/048,885 | 06-Jun-1997 |
| 60/057,668 | 05-Sep-1997 |
| 60/057,642 | 05-Sep-1997 |
| 60/057,635 | 05-Sep-1997 |
| 60/048,881 | 06-Jun-1997 |
| 60/048,880 | 06-Jun-1997 |
| 60/049,020 | 06-Jun-1997 |
| 60/057,667 | 05-Sep-1997 |
| 60/057,666 | 05-Sep-1997 |
| 60/048,876 | 06-Jun-1997 |
| 60/057,627 | 05-Sep-1997 |
| 60/048,896 | 06-Jun-1997 |
| 60/057,764 | 05-Sep-1997 |
| 60/048,895 | 06-Jun-1997 |
| 60/048,884 | 06-Jun-1997 |
| 60/057,769 | 05-Sep-1997 |
| 60/057,643 | 05-Sep-1997 |
| 60/048,894 | 06-Jun-1997 |
| 60/048,971 | 06-Jun-1997 |
| 60/057,763 | 05-Sep-1997 |
| 60/057,584 | 05-Sep-1997 |
| 60/048,964 | 06-Jun-1997 |
| 60/048,893 | 06-Jun-1997 |
| 60/057,661 | 05-Sep-1997 |
| 60/048,899 | 06-Jun-1997 |
| 60/057,647 | 05-Sep-1997 |
| 60/048,882 | 06-Jun-1997 |
| 60/057,650 | 05-Sep-1997 |
| 60/048,892 | 06-Jun-1997 |
| 60/048,901 | 06-Jun-1997 |
| 60/048,900 | 06-Jun-1997 |
| 60/057,646 | 05-Sep-1997 |
| 60/057,651 | 05-Sep-1997 |
| 60/057,662 | 05-Sep-1997 |
| 60/048,915 | 06-Jun-1997 |
| 60/057,654 | 05-Sep-1997 |
| 60/048,916 | 06-Jun-1997 |
| 60/048,972 | 06-Jun-1997 |
| 60/057,775 | 05-Sep-1997 |
| 60/057,644 | 05-Sep-1997 |
| 60/049,019 | 06-Jun-1997 |
| 60/057,765 | 05-Sep-1997 |
| 60/048,970 | 06-Jun-1997 |
| 60/057,762 | 05-Sep-1997 |
| 60/057,774 | 05-Sep-1997 |
| 60/057,649 | 05-Sep-1997 |
| 60/057,648 | 05-Sep-1997 |
| 60/049,374 | 06-Jun-1997 |
| 60/048,875 | 06-Jun-1997 |
| 60/049,373 | 06-Jun-1997 |
| 60/057,771 | 05-Sep-1997 |
| 60/048,917 | 06-Jun-1997 |
| 60/048,949 | 06-Jun-1997 |
| 60/057,770 | 05-Sep-1997 |
| 60/048,897 | 06-Jun-1997 |
| 60/057,761 | 05-Sep-1997 |
| 60/057,776 | 05-Sep-1997 |
| 60/057,760 | 05-Sep-1997 |
| 60/048,974 | 06-Jun-1997 |
| 60/048,883 | 06-Jun-1997 |
| 60/048,898 | 06-Jun-1997 |
| 60/057,778 | 05-Sep-1997 |
| 60/057,629 | 05-Sep-1997 |
| 60/057,777 | 05-Sep-1997 |
| 60/048,962 | 06-Jun-1997 |
| 60/048,963 | 06-Jun-1997 |
| 60/048,878 | 06-Jun-1997 |
| 60/048,877 | 06-Jun-1997 |
| 60/057,628 | 05-Sep-1997 |
| 60/057,634 | 05-Sep-1997 |
| 60/058,669 | 12-Sep-1997 |
| 60/058,668 | 12-Sep-1997 |
| 60/058,750 | 12-Sep-1997 |
| 60/049,566 | 13-Jun-1997 |
| 60/052,989 | 13-Jun-1997 |
| 60/049,608 | 13-Jun-1997 |
| 60/049,609 | 13-Jun-1997 |
| 60/049,607 | 13-Jun-1997 |
| 60/058,665 | 12-Sep-1997 |
| 60/058,971 | 12-Sep-1997 |
| 60/058,972 | 12-Sep-1997 |
| 60/058,975 | 12-Sep-1997 |
| 60/049,611 | 13-Jun-1997 |
| 60/050,901 | 13-Jun-1997 |
| 60/056,250 | 29-Aug-1997 |
| 60/056,296 | 29-Aug-1997 |
| 60/056,293 | 29-Aug-1997 |
| 60/048,356 | 30-May-1997 |
| 60/048,101 | 30-May-1997 |
| 60/050,935 | 30-May-1997 |
| 60/049,550 | 13-Jun-1997 |
| 60/049,610 | 13-Jun-1997 |
| 60/060,841 | 02-Oct-1997 |
| 60/060,834 | 02-Oct-1997 |
| 60/061,060 | 02-Oct-1997 |
| 60/049,606 | 13-Jun-1997 |
| 60/049,548 | 13-Jun-1997 |
| 60/049,549 | 13-Jun-1997 |
| 60/060,865 | 02-Oct-1997 |
| 60/060,844 | 02-Oct-1997 |
| 60/049,547 | 13-Jun-1997 |
| 60/061,059 | 02-Oct-1997 |
| 60/051,480 | 01-Jul-1997 |
| 60/051,381 | 01-Jul-1997 |
| 60/058,663 | 12-Sep-1997 |
| 60/058,598 | 12-Sep-1997 |
| 60/051,925 | 08-Jul-1997 |
| 60/052,793 | 08-Jul-1997 |
| 60/058,664 | 12-Sep-1997 |
| 60/058,660 | 12-Sep-1997 |
| 60/058,661 | 12-Sep-1997 |
| 60/051,926 | 08-Jul-1997 |
| 60/051,929 | 08-Jul-1997 |
| 60/058,785 | 12-Sep-1997 |
| 60/055,722 | 18-Aug-1997 |
| 60/051,932 | 08-Jul-1997 |
| 60/052,732 | 08-Jul-1997 |
| 60/052,803 | 08-Jul-1997 |
| 60/055,949 | 18-Aug-1997 |
| 60/055,948 | 18-Aug-1997 |
| 60/055,723 | 18-Aug-1997 |
| 60/051,931 | 08-Jul-1997 |
| 60/051,930 | 08-Jul-1997 |
| 60/051,920 | 08-Jul-1997 |
| 60/051,918 | 08-Jul-1997 |
| 60/051,916 | 08-Jul-1997 |
| 60/055,953 | 18-Aug-1997 |
| 60/055,950 | 18-Aug-1997 |
| 60/055,947 | 18-Aug-1997 |
| 60/055,964 | 18-Aug-1997 |
| 60/056,360 | 18-Aug-1997 |
| 60/055,954 | 18-Aug-1997 |
| 60/055,984 | 18-Aug-1997 |
| 60/055,684 | 18-Aug-1997 |
| 60/052,795 | 08-Jul-1997 |
| 60/052,733 | 08-Jul-1997 |
| 60/051,928 | 08-Jul-1997 |
| 60/051,919 | 08-Jul-1997 |
| 60/055,952 | 18-Aug-1997 |
| 60/055,985 | 18-Aug-1997 |
| 60/056,359 | 18-Aug-1997 |
| 60/055,725 | 18-Aug-1997 |
| 60/052,661 | 16-Jul-1997 |
| 60/052,870 | 16-Jul-1997 |
| 60/052,871 | 16-Jul-1997 |
| 60/052,872 | 16-Jul-1997 |
| 60/052,875 | 16-Jul-1997 |
| 60/052,873 | 16-Jul-1997 |
| 60/052,874 | 16-Jul-1997 |
| 60/055,724 | 18-Aug-1997 |
| 60/055,726 | 18-Aug-1997 |
| 60/056,361 | 18-Aug-1997 |
| 60/055,946 | 18-Aug-1997 |
| 60/053,441 | 22-Jul-1997 |
| 60/053,440 | 22-Jul-1997 |
| 60/055,683 | 18-Aug-1997 |
| 60/055,989 | 18-Aug-1997 |
| 60/053,442 | 22-Jul-1997 |
| 60/054,209 | 30-Jul-1997 |
| 60/055,968 | 18-Aug-1997 |
| 60/055,972 | 18-Aug-1997 |
| 60/055,969 | 18-Aug-1997 |
| 60/054,212 | 30-Jul-1997 |
| 60/054,234 | 30-Jul-1997 |
| 60/055,986 | 18-Aug-1997 |
| 60/055,386 | 05-Aug-1997 |
| 60/055,970 | 18-Aug-1997 |
| 60/054,807 | 05-Aug-1997 |
| 60/056,561 | 19-Aug-1997 |
| 60/054,214 | 30-Jul-1997 |
| 60/054,218 | 30-Jul-1997 |
| 60/054,236 | 30-Jul-1997 |
| 60/054,215 | 30-Jul-1997 |
| 60/056,543 | 19-Aug-1997 |
| 60/056,729 | 19-Aug-1997 |
| 60/056,534 | 19-Aug-1997 |
| 60/054,217 | 30-Jul-1997 |
| 60/054,213 | 30-Jul-1997 |
| 60/056,730 | 19-Aug-1997 |
| 60/056,727 | 19-Aug-1997 |
| 60/054,211 | 30-Jul-1997 |
| 60/056,554 | 19-Aug-1997 |
| 60/055,309 | 05-Aug-1997 |
| 60/056,563 | 19-Aug-1997 |
| 60/054,798 | 05-Aug-1997 |
| 60/056,557 | 19-Aug-1997 |
| 60/055,312 | 05-Aug-1997 |
| 60/056,371 | 19-Aug-1997 |
| 60/056,732 | 19-Aug-1997 |
| 60/055,310 | 05-Aug-1997 |
| 60/056,556 | 19-Aug-1997 |
| 60/056,535 | 19-Aug-1997 |
| 60/056,369 | 19-Aug-1997 |
| 60/056,555 | 19-Aug-1997 |
| 60/056,370 | 19-Aug-1997 |
| 60/054,804 | 05-Aug-1997 |
| 60/056,731 | 19-Aug-1997 |
| 60/056,366 | 19-Aug-1997 |
| 60/054,809 | 05-Aug-1997 |
| 60/054,806 | 05-Aug-1997 |
| 60/054,803 | 05-Aug-1997 |
| 60/056,364 | 19-Aug-1997 |
| 60/055,311 | 05-Aug-1997 |
| 60/056,367 | 19-Aug-1997 |
| 60/056,365 | 19-Aug-1997 |
| 60/054,808 | 05-Aug-1997 |
| 60/056,368 | 19-Aug-1997 |
| 60/056,726 | 19-Aug-1997 |
| 60/056,728 | 19-Aug-1997 |
| 60/056,628 | 19-Aug-1997 |
| 60/056,629 | 19-Aug-1997 |
| 60/056,271 | 29-Aug-1997 |
| 60/056,247 | 29-Aug-1997 |
| 60/056,073 | 29-Aug-1997 |
| 60/056,270 | 29-Aug-1997 |
| 60/057,626 | 05-Sep-1997 |
| 60/057,663 | 05-Sep-1997 |
| 60/057,669 | 05-Sep-1997 |
| 60/058,974 | 12-Sep-1997 |
| 60/058,973 | 12-Sep-1997 |
| 60/058,667 | 12-Sep-1997 |
| 60/058,666 | 12-Sep-1997 |
| 60/060,837 | 02-Oct-1997 |
| 60/060,862 | 02-Oct-1997 |
| 60/060,839 | 02-Oct-1997 |
| 60/060,866 | 02-Oct-1997 |
| 60/060,843 | 02-Oct-1997 |
| 60/060,836 | 02-Oct-1997 |
| 60/060,874 | 02-Oct-1997 |
| 60/060,838 | 02-Oct-1997 |
| 60/060,884 | 02-Oct-1997 |
| 60/060,833 | 02-Oct-1997 |
| 60/060,880 | 02-Oct-1997 |
| 60/061,529 | 09-Oct-1997 |
| 60/071,498 | 09-Oct-1997 |
| 60/061,463 | 09-Oct-1997 |
| 60/061,536 | 09-Oct-1997 |
| 60/061,527 | 09-Oct-1997 |
| 60/061,532 | 09-Oct-1997 |
| 60/063,100 | 24-Oct-1997 |
| 60/062,784 | 24-Oct-1997 |
| 60/063,148 | 24-Oct-1997 |
| 60/063,387 | 24-Oct-1997 |
| 60/063,386 | 24-Oct-1997 |
| 60/063,089 | 24-Oct-1997 |
| 60/063,091 | 24-Oct-1997 |
| 60/063,090 | 24-Oct-1997 |
| 60/063,092 | 24-Oct-1997 |
| 60/063,111 | 24-Oct-1997 |
| 60/063,109 | 24-Oct-1997 |
| 60/063,110 | 24-Oct-1997 |
| 60/063,101 | 24-Oct-1997 |
| 60/063,098 | 24-Oct-1997 |
| 60/063,097 | 24-Oct-1997 |
| 60/074,037 | 09-Feb-1998 |
| 60/074,157 | 09-Feb-1998 |
| 60/074,118 | 09-Feb-1998 |
| 60/076,053 | 26-Feb-1998 |
| 60/076,057 | 26-Feb-1998 |
| 60/076,054 | 26-Feb-1998 |
| 60/076,052 | 26-Feb-1998 |
| 60/076,051 | 26-Feb-1998 |
| 60/113,006 | 18-Dec-1998 |
| 60/112,809 | 17-Dec-1998 |
| 60/116,330 | 19-Jan-1999 |
| 60/119,468 | 10-Feb-1999 |
| 60/125,055 | 18-Mar-1999 |
| 60/128,693 | 09-Apr-1999 |
| 60/130,991 | 26-Apr-1999 |
| 60/137,725 | 07-Jun-1999 |
| 60/145,220 | 23-Jul-1999 |
| 60/149,182 | 17-Aug-1999 |
| 60/152,317 | 03-Sep-1999 |
| 60/152,315 | 03-Sep-1999 |
| 60/155,709 | 24-Sep-1999 |
| 60/163,085 | 02-Nov-1999 |
| 60/172,411 | 17-Dec-1999 |
| 60/134,068 | 13-May-1999 |
| US00/12788 | 11-May-2000 |
| 60/167,061 | 23-Nov-1999 |
| 60/124,146 | 12-Mar-1999 |
| US00/06043 | 09-Mar-2000 |
| 60/124,093 | 12-Mar-1999 |
| US00/06012 | 09-Mar-2000 |
| 60/166,989 | 23-Nov-1999 |
| US00/06058 | 09-Mar-2000 |
| 60/124,145 | 12-Mar-1999 |
| 60/168,654 | 03-Dec-1999 |
| 60/124,099 | 12-Mar-1999 |
| US00/06044 | 09-Mar-2000 |
| 60/168,661 | 03-Dec-1999 |
| 60/124,096 | 12-Mar-1999 |
| 60/168,622 | 03-Dec-1999 |
| US00/06059 | 09-Mar-2000 |
| US00/06042 | 09-Mar-2000 |
| 60/124,143 | 12-Mar-1999 |
| 60/168,663 | 03-Dec-1999 |
| 60/124,095 | 12-Mar-1999 |
| US00/06014 | 09-Mar-2000 |
| 60/138,598 | 11-Jun-1999 |
| 60/168,665 | 03-Dec-1999 |
| US00/06013 | 09-Mar-2000 |
| 60/138,626 | 11-Jun-1999 |
| 60/168,662 | 03-Dec-1999 |
| 60/125,360 | 19-Mar-1999 |
| US00/06049 | 09-Mar-2000 |
| 60/168,667 | 03-Dec-1999 |
| 60/138,574 | 11-Jun-1999 |
| 60/124,144 | 12-Mar-1999 |
| 60/124,142 | 12-Mar-1999 |
| 60/138,597 | 11-Jun-1999 |
| 60/168,666 | 03-Dec-1999 |
| US00/06057 | 09-Mar-2000 |
| 60/125,359 | 19-Mar-1999 |
| 60/168,664 | 03-Dec-1999 |
| US00/06824 | 16-Mar-2000 |
| 60/126,051 | 23-Mar-1999 |
| 60/169,906 | 10-Dec-1999 |
| US00/06765 | 16-Mar-2000 |
| 60/125,362 | 19-Mar-1999 |
| US00/06792 | 16-Mar-2000 |
| 60/169,980 | 10-Dec-1999 |
| US00/06830 | 16-Mar-2000 |
| 60/125,361 | 19-Mar-1999 |
| 60/169,910 | 10-Dec-1999 |
| 60/125,812 | 23-Mar-1999 |
| 60/169,936 | 10-Dec-1999 |
| US00/06782 | 16-Mar-2000 |
| 60/126,054 | 23-Mar-1999 |
| US00/06822 | 16-Mar-2000 |
| 60/169,916 | 10-Dec-1999 |
| US00/06791 | 16-Mar-2000 |
| 60/169,946 | 10-Dec-1999 |
| 60/125,815 | 23-Mar-1999 |
| 60/125,358 | 19-Mar-1999 |
| US00/06828 | 16-Mar-2000 |
| 60/169,616 | 08-Dec-1999 |
| 60/125,364 | 19-Mar-1999 |
| 60/169,623 | 08-Dec-1999 |
| US00/06823 | 16-Mar-2000 |
| 60/169,617 | 08-Dec-1999 |
| US00/06781 | 16-Mar-2000 |
| 60/125,363 | 19-Mar-1999 |
| 60/172,410 | 17-Dec-1999 |
| 60/126,502 | 26-Mar-1999 |
| US00/07505 | 22-Mar-2000 |
| 60/126,503 | 26-Mar-1999 |
| 60/172,409 | 17-Dec-1999 |
| US00/07440 | 22-Mar-2000 |
| 60/126,505 | 26-Mar-1999 |
| 60/172,412 | 17-Dec-1999 |
| US00/07506 | 22-Mar-2000 |
| 60/126,594 | 26-Mar-1999 |
| 60/172,408 | 17-Dec-1999 |
| US00/07507 | 22-Mar-2000 |
| 60/172,413 | 17-Dec-1999 |
| US00/07535 | 22-Mar-2000 |
| 60/126,511 | 26-Mar-1999 |
| 60/126,595 | 26-Mar-1999 |
| 60/171,549 | 22-Dec-1999 |
| US00/07525 | 22-Mar-2000 |
| 60/171,504 | 22-Dec-1999 |
| 60/126,598 | 26-Mar-1999 |
| US00/07534 | 22-Mar-2000 |
| US00/07483 | 22-Mar-2000 |
| 60/171,552 | 22-Dec-1999 |
| 60/126,596 | 26-Mar-1999 |
| 60/126,600 | 26-Mar-1999 |
| US00/07526 | 22-Mar-2000 |
| 60/171,550 | 22-Dec-1999 |
| 60/126,501 | 26-Mar-1999 |
| 60/171,551 | 22-Dec-1999 |
| US00/07527 | 22-Mar-2000 |
| 60/126,504 | 26-Mar-1999 |
| US00/07661 | 23-Mar-2000 |
| 60/174,847 | 07-Jan-2000 |
| 60/174,853 | 07-Jan-2000 |
| US00/07579 | 23-Mar-2000 |
| 60/126,509 | 26-Mar-1999 |
| 60/174,852 | 07-Jan-2000 |
| 60/242,710 | 25-Oct-2000 |
| 60/126,506 | 26-Mar1999 |
| US00/07723 | 23-Mar-2000 |
| 60/174,850 | 07-Jan-2000 |
| US00/07724 | 23-Mar-2000 |
| 60/126,510 | 26-Mar-1999 |
| 60/138,573 | 11-Jun-1999 |
| US00/14929 | 01-Jun-2000 |
| 60/174,851 | 07-Jan-2000 |
| 60/126,508 | 26-Mar-1999 |
| US00/07722 | 23-Mar-2000 |
| 60/174,871 | 07-Jan-2000 |
| US00/07578 | 23-Mar-2000 |
| 60/174,872 | 07-Jan-2000 |
| 60/126,507 | 26-Mar-1999 |
| 60/174,877 | 07-Jan-2000 |
| US00/07726 | 23-Mar-2000 |
| 60/126,597 | 26-Mar-1999 |
| 60/126,601 | 26-Mar-1999 |
| US00/07677 | 23-Mar-2000 |
| 60/176,064 | 14-Jan-2000 |
| 60/154,373 | 17-Sep-1999 |
| 60/176,063 | 14-Jan-2000 |
| US00/07725 | 23-Mar-2000 |
| 60/126,602 | 26-Mar-1999 |
| 60/176,052 | 14-Jan-2000 |
| US00/09070 | 06-Apr-2000 |
| 60/128,695 | 09-Apr-1999 |
| US00/08982 | 06-Apr-2000 |
| 60/128,696 | 09-Apr-1999 |
| 60/176,069 | 14-Jan-2000 |
| 60/176,068 | 14-Jan-2000 |
| US00/08983 | 06-Apr-2000 |
| 60/128,703 | 09-Apr-1999 |
| 60/176,929 | 20-Jan-2000 |
| US00/09067 | 06-Apr-2000 |
| 60/128,697 | 09-Apr-1999 |
| US00/09066 | 06-Apr-2000 |
| 60/176,926 | 20-Jan-2000 |
| 60/128,698 | 09-Apr-1999 |
| US00/09068 | 06-Apr-2000 |
| 60/128,699 | 09-Apr-1999 |
| 60/177,050 | 20-Jan-2000 |
| 60/177,166 | 20-Jan-2000 |
| US00/08981 | 06-Apr-2000 |
| 60/128,701 | 09-Apr-1999 |
| 60/128,700 | 09-Apr-1999 |
| 60/176,930 | 20-Jan-2000 |
| US00/08980 | 06-Apr-2000 |
| 60/128,694 | 09-Apr-1999 |
| US00/09071 | 06-Apr-2000 |
| 60/176,931 | 20-Jan-2000 |
| US00/09069 | 06-Apr-2000 |
| 60/177,049 | 20-Jan-2000 |
| 60/128,702 | 09-Apr-1999 |
| 60/138,629 | 11-Jun-1999 |
| US00/15136 | 01-Jun-2000 |
| 60/138,628 | 11-Jun-1999 |
| US00/14926 | 01-Jun-2000 |
| 60/138,631 | 11-Jun-1999 |
| US00/14963 | 01-Jun-2000 |
| 60/138,632 | 11-Jun-1999 |
| US00/15135 | 01-Jun-2000 |
| US00/14934 | 01-Jun-2000 |
| 60/138,599 | 11-Jun-1999 |
| 60/138,572 | 11-Jun-1999 |
| US00/14933 | 01-Jun-2000 |
| US00/15137 | 01-Jun-2000 |
| 60/138,625 | 11-Jun-1999 |
| 60/138,633 | 11-Jun-1999 |
| US00/14928 | 01-Jun-2000 |
| 60/,138,630 | 11-Jun-1999 |
| US00/14973 | 01-Jun-2000 |
| US00/14964 | 01-Jun-2000 |
| 60/138,627 | 11-Jun-1999 |
| US00/26376 | 26-Sep-2000 |
| 60/155,808 | 27-Sep-1999 |
| US00/26371 | 26-Sep-2000 |
| 60/155,804 | 27-Sep-1999 |
| 60/155,807 | 27-Sep-1999 |
| US00/26324 | 26-Sep-2000 |
| US00/26323 | 26-Sep-2000 |
| 60/155,805 | 27-Sep-1999 |
| US00/26337 | 26-Sep-2000 |
| 60/155,806 | 27-Sep-1999 |
| 60/201,194 | 02-May-2000 |
| 60/212,142 | 16-Jun-2000 |
| US00/29363 | 25-Oct-2000 |
| 60/215,139 | 30-Jun-2000 |
| 60/162,239 | 29-Oct-1999 |
| US00/29360 | 25-Oct-2000 |
| 60/162,211 | 29-Oct-1999 |
| 60/215,138 | 30-Jun-2000 |
| 60/162,240 | 29-Oct-1999 |
| US00/29362 | 25-Oct-2000 |
| 60/215,131 | 30-Jun-2000 |
| US00/29365 | 25-Oct-2000 |
| 60/162,237 | 29-Oct-1999 |
| 60/219,666 | 21-Jul-2000 |
| 60/215,134 | 30-Jun-2000 |
| US00/29364 | 25-Oct-2000 |
| 60/162,238 | 29-Oct-1999 |
| 60/163,580 | 05-Nov-1999 |
| 60/215,130 | 30-Jun-2000 |
| US00/30040 | 01-Nov-2000 |
| US00/30037 | 01-Nov-2000 |
| 60/163,577 | 05-Nov-1999 |
| 60/215,137 | 30-Jun-2000 |
| 60/215,133 | 30-Jun-2000 |
| 60/163,581 | 05-Nov-1999 |
| US00/30045 | 01-Nov-2000 |
| 60/163,576 | 05-Nov-1999 |
| US00/30036 | 01-Nov-2000 |
| 60/221,366 | 27-Jul-2000 |
| 60/221,367 | 27-Jul-2000 |
| 60/195,296 | 07-Apr-2000 |
| US00/30039 | 01-Nov-2000 |
| 60/164,344 | 09-Nov-1999 |
| 60/221,142 | 27-Jul-2000 |
| US00/30654 | 08-Nov-2000 |
| 60/164,835 | 12-Nov-1999 |
| 60/164,744 | 12-Nov-1999 |
| US00/30628 | 08-Nov-2000 |
| 60/215,140 | 30-Jun-20O0 |
| US00/30653 | 08-Nov-2000 |
| 60/164,735 | 12-Nov-1999 |
| 60/221,193 | 27-Jul-2000 |
| 60/222,904 | 03-Aug-2000 |
| 60/164,825 | 12-Nov-1999 |
| US00/30629 | 08-Nov-2000 |
| 60/224,007 | 04-Aug-2000 |
| US00/30679 | 08-Nov-2000 |
| 60/164,834 | 12-Nov-1999 |
| 60/164,750 | 12-Nov-1999 |
| 60/215,128 | 30-Jun-2000 |
| US00/30674 | 08-Nov-2000 |
| 60/166,415 | 19-Nov-1999 |
| US00/31162 | 15-Nov-2000 |
| 60/215,136 | 30-Jun-2000 |
| 60/166,414 | 19-Nov-1999 |
| 60/219,665 | 21-Jul-2000 |
| US00/31282 | 15-Nov-2000 |
| 60/215,132 | 30-Jun-2000 |
| 60/164,731 | 12-Nov-1999 |
| US00/30657 | 08-Nov-2000 |
| 60/256,968 | 21-Dec-2000 |
| 60/226,280 | 18-Aug-2000 |
| US01/01396 | 17-Jan-2001 |
| 60/226,380 | 18-Aug-2000 |
| US01/01387 | 17-Jan-2001 |
| 60/259,803 | 05-Jan-2001 |
| US01/01567 | 17-Jan-2001 |
| 60/228,084 | 28-Aug-2000 |
| US01/01431 | 17-Jan-2001 |
| 60/231,968 | 12-Sep-2000 |
| 60/234,211 | 20-Sep-2000 |
| US01/00544 | 09-Jan-2001 |
| 60/226,282 | 18-Aug-2000 |
| US01/01435 | 17-Jan-2001 |
| 60/232,104 | 12-Sep-2000 |
| US01/01386 | 17-Jan-2001 |
| 60/234,210 | 20-Sep-2000 |
| US01/01565 | 17-Jan-2001 |
| 60/259,805 | 05-Jan-2001 |
| US01/01394 | 17-Jan-2001 |
| 60/226,278 | 18-Aug-2000 |
| 60/259,678 | 05-Jan-2001 |
| 60/226,279 | 18-Aug-2000 |
| US01/01434 | 17-Jan-2001 |
| 60/226,281 | 18-Aug-2000 |
| US01/01397 | 17-Jan-2001 |
| 60/231,969 | 12-Sep-2000 |
| US01/01385 | 17-Jan-2001 |
| 60/228,086 | 28-Aug-2000 |
| 60/259,516 | 04-Jan-2001 |
| US01/01384 | 17-Jan-2001 |
| 60/228,083 | 28-Aug-2000 |
| 60/259,804 | 05-Jan-2001 |
| US01/01383 | 17-Jan-2001 |
| 60/064,988 | 07-Nov-1997 |
| 60/064,912 | 07-Nov-1997 |
| 60/064,900 | 07-Nov-1997 |
| 60/064,983 | 07-Nov-1997 |
| 60/064,911 | 07-Nov-1997 |
| 60/064,985 | 07-Nov-1997 |
| 60/064,908 | 07-Nov-1997 |
| 60/064,984 | 07-Nov-1997 |
| 60/064,987 | 07-Nov-1997 |
| 60/066,100 | 17-Nov-1997 |
| 60/066,095 | 17-Nov-1997 |
| 60/066,089 | 17-Nov-1997 |
| 60/066,090 | 17-Nov-1997 |
| 60/066,094 | 17-Nov-1997 |
| 60/068,007 | 18-Dec-1997 |
| 60/068,006 | 18-Dec-1997 |
| 60/068,008 | 18-Dec-1997 |
| 60/068,057 | 18-Dec-1997 |
| 60/070,923 | 18-Dec-1997 |
| 60/068,053 | 18-Dec-1997 |
| 60/068,054 | 18-Dec-1997 |
| 60/068,064 | 18-Dec-1997 |
| 60/068,369 | 19-Dec-1997 |
| 60/068,367 | 19-Dec-1997 |
| 60/068,169 | 19-Dec-1997 |
| 60/068,365 | 19-Dec-1997 |
| 60/070,704 | 07-Jan-1998 |
| 60/070,657 | 07-Jan-1998 |
| 60/070,658 | 07-Jan-1998 |
| 60/070,692 | 07-Jan-1998 |
| 60/073,160 | 30-Jan-1998 |
| 60/073,159 | 30-Jan-1998 |
| 60/073,165 | 30-Jan-1998 |
| 60/073,164 | 30-Jan-1998 |
| 60/073,167 | 30-Jan-1998 |
| 60/073,162 | 30-Jan-1998 |
| 60/073,161 | 30-Jan-1998 |
| 60/073,170 | 30-Jan-1998 |
| 60/074,341 | 09-Feb-1998 |
| 60/074,141 | 09-Feb-1998 |
| 60/077,714 | 12-Mar-1998 |
| 60/077,687 | 12-Mar-1998 |
| 60/077,696 | 12-Mar-1998 |
| 60/077,686 | 12-Mar-1998 |
| 60/078,574 | 19-Mar-1998 |
| 60/078,566 | 19-Mar-1998 |
| 60/078,576 | 19-Mar-1998 |
| 60/078,577 | 19-Mar-1998 |
| 60/078,581 | 19-Mar-1998 |
| 60/078,573 | 19-Mar-1998 |
| 60/078,578 | 19-Mar-1998 |
| 60/078,563 | 19-Mar-1998 |
| 60/080,313 | 01-Apr-1998 |
| 60/080,312 | 01-Apr-1998 |
| 60/080,314 | 01-Apr-1998 |
| 60/085,105 | 12-May-1998 |
| 60/085,180 | 12-May-1998 |
| 60/085,093 | 12-May-1998 |
| 60/085,094 | 12-May-1998 |
| 60/085,928 | 18-May-1998 |
| 60/085,920 | 18-May-1998 |
| 60/085,906 | 18-May-1998 |
| 60/085,927 | 18-May-1998 |
| 60/085,924 | 18-May-1998 |
| 60/085,925 | 18-May-1998 |
| 60/085,921 | 18-May-1998 |
| 60/085,922 | 18-May-1998 |
| 60/085,923 | 18-May-1998 |
| 60/090,112 | 22-Jun-1998 |
| 60/089,507 | 16-Jun-1998 |
| 60/089,508 | 16-Jun-1998 |
| 60/089,510 | 16-Jun-1998 |
| 60/089,509 | 16-Jun-1998 |
| 60/090,113 | 22-Jun-1998 |
| 60/092,956 | 15-Jul-1998 |
| 60/092,921 | 15-Jul-1998 |
| 60/092,922 | 15-Jul-1998 |
| 60/094,657 | 30-Jul-1998 |
| 60/095,486 | 05-Aug-1998 |
| 60/096,319 | 12-Aug-1998 |
| 60/095,455 | 06-Aug-1998 |
| 60/095,454 | 06-Aug-1998 |
| 60/097,917 | 25-Aug-1998 |
| 60/098,634 | 31-Aug-1998 |
| 60/101,546 | 23-Sep-1998 |
| 60/102,895 | 02-Oct-1998 |
| 60/108,207 | 12-Nov-1998 |
| 60/236,326 | 29-Sep-2000 |
| US01/01432 | 17-Jan-2001 |
| US98/04482 | 06-Mar-1998 |
| 09/148,545 | 04-Sep-1998 |
| 09/149,476 | 08-Sep-1998 |
| US98/04493 | 06-Mar-1998 |
| 60/190,068 | 17-Mar-2000 |
| US98/04858 | 12-Mar-1998 |
| 09/152,060 | 11-Sep-1998 |
| 60/265,583 | 02-Feb-2001 |
| 09/154,707 | 17-Sep-1998 |
| US98/05311 | 19-Mar-1998 |
| US98/06801 | 07-Apr-1998 |
| 09/166,780 | 06-Oct-1998 |
| 09/189,144 | 10-Nov-1998 |
| US98/10868 | 28-May-1998 |
| 60/184,836 | 24-Feb-2000 |
| 60/193,170 | 29-Mar-2000 |
| US98/11422 | 04-Jun-1998 |
| 09/205,258 | 04-Dec-1998 |
| US98/12125 | 11-Jun-1998 |
| 09/209,462 | 11-Dec-1998 |
| 09/213,365 | 17-Dec-1998 |
| US98/13608 | 30-Jun-1998 |
| 60/239,899 | 13-Oct-2000 |
| US98/13684 | 07-Jul-1998 |
| 60/180,909 | 08-Feb-2000 |
| US98/14613 | 15-Jul-1998 |
| 09/229,982 | 14-Jan-1999 |
| US98/15949 | 29-Jul-1998 |
| 09/236,557 | 26-Jan-1999 |
| 09/666,984 | 21-Sep-2000 |
| 2,298,852 | 29-Jul-1998 |
| 60/238,291 | 06-Oct-2000 |
| US98/16235 | 04-Aug-1998 |
| 09/244,112 | 04-Feb-1999 |
| 09/251,329 | 17-Feb-1999 |
| US98/17044 | 18-Aug-1998 |
| 09/716,128 | 17-Nov-2000 |
| 09/729,835 | 06-Dec-2000 |
| US98/17709 | 27-Aug-1998 |
| 09/257,179 | 25-Feb-1999 |
| US98/18360 | 03-Sep-1998 |
| 60/262,066 | 18-Jan-2001 |
| 09/722,329 | 28-Nov-2000 |
| 09/262,109 | 04-Mar-1999 |
| US98/20775 | 01-Oct-1998 |
| 09/281,976 | 31-Mar-1999 |
| 09/288,143 | 08-Apr-1999 |
| 60/244,591 | 01-Nov-2000 |
| US98/21142 | 08-Oct-1998 |
| US98/22376 | 23-Oct-1998 |
| 09/296,622 | 23-Apr-1999 |
| 60/239,893 | 13-Oct-2000 |
| 09/305,736 | 05-May-1999 |
| US98/23435 | 04-Nov-1998 |
| US98/27059 | 17-Dec-1998 |
| 09/334,595 | 17-Jun-1999 |
| 09/348,457 | 07-Jul-1999 |
| 09/739,907 | 20-Dec-2000 |
| US99/00108 | 06-Jan-1999 |
| 60/232,150 | 12-Sep-2000 |
| 09/363,044 | 29-Jul-1999 |
| US99/01621 | 27-Jan-1999 |
| US99/02293 | 04-Feb-1999 |
| 09/369,247 | 05-Aug-1999 |
| 09/716,129 | 17-Nov-2000 |
| US99/03939 | 24-Feb-1999 |
| US99/05721 | 11-Mar-1999 |
| 09/393,022 | 09-Sep-1999 |
| 09/397,945 | 17-Sep-1999 |
| 60/231,846 | 11-Sep-2000 |
| US99/09847 | 06-May-1999 |
| 09/437,658 | 10-Nov-1999 |
| US99/13418 | 15-Jun-1999 |
| 60/263,681 | 24-Jan-2001 |
| 60/263,230 | 23-Jan-2001 |
| 09/461,325 | 14-Dec-1999 |
| US99/15849 | 14-Jul-1999 |
| 60/234,925 | 25-Sep-2001 |
| US01/00911 | 12-Jan-2001 |
| 09/482,273 | 13-Jan-2000 |
| 09/489,847 | 24-Jan-2000 |
| US99/17130 | 29-Jul-1999 |
| US99/19330 | 24-Aug-1999 |
| 09/511,554 | 23-Feb-2000 |
| 09/531,119 | 20-Mar-2000 |
| US99/22012 | 22-Sep-1999 |
| US99/26409 | 09-Nov-1999 |
| 09/565,391 | 05-May-2000 |
| US99/29950 | 16-Dec-1999 |
| 09/591,316 | 09-Jun-2000 |
| 09/618,150 | 17-Jul-2000 |
| US00/00903 | 18-Jan-2000 |
| 09/628,508 | 28-Jul-2000 |
| US00/03062 | 08-Feb-2000 |
| US00/06783 | 16-Mar-2000 |
| 09/661,453 | 13-Sep-2000 |
| 09/684,524 | 10-Oct-2000 |
| US00/08979 | 06-Apr-2000 |
| 09/726,643 | 01-Dec-2000 |
| US00/15187 | 02-Jun-2000 |
| 09/756,168 | 09-Jan-2001 |
| US00/19735 | 20-Jul-2000 |
| US00/22325 | 16-Aug-2000 |
| US00/24008 | 31-Aug-2000 |
| US00/26013 | 22-Sep-2000 |
| US00/28664 | 17-Oct-2000 |
| 60/277340 | 21-Mar-01 |
| 09/781,417 | 13-Feb-01 |
| 09/789,561 | 22-Feb-01 |
| 09/800,729 | 08-Mar-01 |
| 09/756,168 | 09-Jan-01 |

[1293] Furthermore, the contents and sequence listings of application Ser. No. 09/091,873 filed Jun. 25, 1998; No. 60/229,358 filed on Apr. 12, 2000; No. 60/199,384 filed on Apr. 25, 2000 and No. 60/256,931 filed on Dec. 21, 2000 are hereby incorporation by reference in their entirety.

What is claimed:

1. An albumin fusion protein comprising a member selected from the group consisting of:
(a) a Therapeutic protein:X and albumin comprising the amino acid sequence of SEQ ID NO:18;
(b) a Therapeutic protein:X and a fragment or a variant of the amino acid sequence of SEQ ID NO:18, wherein said fragment or variant has albumin activity;
(c) a Therapeutic protein:X and a fragment or a variant of the amino acid sequence of SEQ ID NO:18, wherein said fragment or variant has albumin activity, and further wherein said albumin activity is the ability to prolong the shelf life of the Therapeutic protein:X compared to the shelf-life of the Therapeutic protein:X in an unfused state;
(d) a Therapeutic protein:X and a fragment or a variant of the amino acid sequence of SEQ ID NO:18, wherein said fragment or variant has albumin activity, and further wherein the fragment or variant comprises the amino acid sequence of amino acids 1-387 of SEQ ID NO:18;
(e) a fragment or variant of a Therapeutic protein:X and albumin comprising the amino acid sequence of SEQ ID NO:18, wherein said fragment or variant has a biological activity of the Therapeutic protein:X;
(f) a Therapeutic protein:X, or fragment or variant thereof, and albumin, or fragment or variant thereof, of (a) to (e), wherein the Therapeutic protein:X, or fragment or variant thereof, is fused to the N-terminus of albumin, or the N-terminus of the fragment or variant of albumin;
(g) a Therapeutic protein:X, or fragment or variant thereof, and albumin, or fragment or variant thereof, of (a) to (e), wherein the Therapeutic protein:X, or fragment or variant thereof, is fused to the C-terminus of albumin, or the C-terminus of the fragment or variant of albumin;
(h) a Therapeutic protein:X, or fragment or variant thereof, and albumin, or fragment or variant thereof, of (a) to (e), wherein the Therapeutic protein:X, or fragment or variant thereof, is fused to the N-terminus and C-terminus of albumin, or the N-terminus and the C-terminus of the fragment or variant of albumin;
(i) a Therapeutic protein:X, or fragment or variant thereof, and albumin, or fragment or variant thereof, of (a) to (e), which comprises a first Therapeutic protein:X, or fragment or variant thereof, and a second Therapeutic protein:X, or fragment or variant thereof, wherein said first Therapeutic protein:X, or fragment or variant thereof, is different from said second Therapeutic protein:X, or fragment or variant thereof,
(j) a Therapeutic protein:X, or fragment or variant thereof, and albumin, or fragment or variant thereof, of (a) to (i), wherein the Therapeutic protein:X, or fragment or variant thereof, is separated from the albumin or the fragment or variant of albumin by a linker; and
(k) a Therapeutic protein:X, or fragment or variant thereof, and albumin, or fragment or variant thereof, of (a) to (j), wherein the albumin fusion protein has the following formula:
R1-L-R2; R2-L-R1; or R1-L-R2-L-R1,
and further wherein R1 is Therapeutic protein:X, or fragment or variant thereof, L is a peptide linker, and R2 is albumin comprising the amino acid sequence of SEQ II) NO: 18 or a fragment or variant of albumin.

2. The albumin fusion protein of claim 1, wherein the shelf-life of the albumin fusion protein is greater than the shelf-life of the Therapeutic protein:X, or fragment or variant thereof, in an unfused state.

3. The albumin fusion protein of claim 1, wherein the in vitro biological activity of the Therapeutic protein:X, or fragment or variant thereof, fused to albumin, or fragment or variant thereof, is greater than the in vitro biological activity of the Therapeutic protein:X, or fragment or variant thereof, in an unfused state.

4. The albumin fusion protein of claim 1, wherein the in vivo biological activity of the Therapeutic protein:X, or fragment or variant thereof, fused to albumin, or fragment or variant thereof, is greater than the in vivo biological activity of the Therapeutic protein:X, or fragment or variant thereof, in an unfused state.

5. An albumin fusion protein comprising a Therapeutic protein:X, or fragment or variant thereof, inserted into an albumin, or fragment or variant thereof, comprising the amino acid sequence of SEQ ID NO:18 or fragment or variant thereof.

6. An albumin fusion protein comprising a Therapeutic protein:X, or fragment or variant thereof, inserted into an albumin, or fragment or variant thereof, comprising an amino acid sequence selected from the group consisting of:
(a) amino acids 54 to 61 of SEQ ID NO: 18;
(b) amino acids 76 to 89 of SEQ ID NO: 18;
(c) amino acids 92 to 100 of SEQ ID NO: 18;
(d) amino acids 170 to 176 of SEQ ID NO: 18;
(e) amino acids 247 to 252 of SEQ ID NO: 18;
(f) amino acids 266 to 277 of SEQ ID NO: 18;
(g) amino acids 280 to 288 of SEQ ID NO:18;
(h) amino acids 362 to 368 of SEQ ID NO: 18;
(i) amino acids 439 to 447 of SEQ ID NO: 18;
(j) amino acids 462 to 475 of SEQ ID NO: 18;
(k) amino acids 478 to 486 of SEQ ID NO: 18; and
(l) amino acids 560 to 566 of SEQ ID NO:18.

7. The albumin fusion protein of claim 5, wherein said albumin fusion protein comprises a portion of albumin sufficient to prolong the shelf-life of the Therapeutic protein:X, or fragment or variant thereof, as compared to the shelf-life of the Therapeutic protein:X, or fragment or variant thereof, in an unfused state.

8. The albumin fusion protein of claim 6, wherein said albumin fusion protein comprises a portion of albumin sufficient to prolong the shelf-life of the Therapeutic protein:X, or fragment or variant thereof, as compared to the shelf-life of the Therapeutic protein:X, or fragment or variant thereof, in an unfused state.

9. The albumin fusion protein of claim 5, wherein said albumin fusion protein comprises a portion of albumin sufficient to prolong the in vitro biological activity of the Therapeutic protein:X, or fragment or variant thereof, fused to albumin as compared to the in vitro biological activity of the Therapeutic protein:X, or fragment or variant thereof, in an unfused state.

10. The albumin fusion protein of claim 6, wherein said albumin fusion protein comprises a portion of albumin sufficient to prolong the in vitro biological activity of the Therapeutic protein:X, or fragment or variant thereof, fused to albumin as compared to the in vitro biological activity of the Therapeutic protein:X, or fragment or variant thereof, in an unfused state.

11. The albumin fusion protein of claim 5 wherein said albumin fusion protein comprises a portion of albumin sufficient to prolong the in vivo biological activity of the Therapeutic protein:X, or fragment or variant thereof, fused to albumin compared to the in vivo biological activity of the Therapeutic protein:X, or fragment or variant thereof, in an unfused state.

12. The albumin fusion protein of claim 6 wherein said albumin fusion protein comprises a portion of albumin sufficient to prolong the in vivo biological activity of the Therapeutic protein:X, or fragment or variant thereof, fused to albumin compared to the in vivo biological activity of the Therapeutic protein:X, or fragment or variant thereof, in an unfused state.

13. The albumin fusion protein of any one of claims 1-12, which is non-glycosylated.

14. The albumin fusion protein of any one of claims 1-12, which is expressed in yeast.

15. The albumin fusion protein of claim 14, wherein the yeast is glycosylation deficient.

16. The albumin fusion protein of claim 14 wherein the yeast is glycosylation and protease deficient.

17. The albumin fusion protein of any one of claims 1-12, which is expressed by a mammalian cell.

18. The albumin fusion protein of any one of claims 1-12, wherein the albumin fusion protein is expressed by a mammalian cell in culture.

19. The albumin fusion protein of any one of claims 1-12, wherein the albumin fusion protein further comprises a secretion leader sequence.

20. A composition comprising the albumin fusion protein of any one of claims 1-12 and a pharmaceutically acceptable carrier.

21. A kit comprising the composition of claim 20.

22. A method of treating a disease or disorder in a patient, comprising the step of administering the albumin fusion protein of any one of claims 1-12.

23. The method of claim 22, wherein the disease or disorder comprises indication:Y.

24. A method of treating a patient with a disease or disorder that is modulated by Therapeutic protein:X, or fragment or variant thereof, comprising the step of administering an effective amount of the albumin fusion protein of any one of claims 1-12.

25. The method of claim 24, wherein the disease or disorder is indication:Y.

26. A method of extending the shelf life of Therapeutic protein:X, or fragment or variant thereof, comprising the step of fusing the Therapeutic protein:X, or fragment or variant thereof, to albumin, or fragment or variant thereof, sufficient to extend the shelf-life of the Therapeutic protein:X, or fragment or variant thereof, compared to the shelf-life of the Therapeutic protein:X, or fragment or variant thereof, in an unfused state.

27. A nucleic acid molecule comprising a polynucleotide sequence encoding the albumin fusion protein of any one of claims 1-12.

28. A vector comprising the nucleic acid molecule of claim 27.

29. A host cell comprising the nucleic acid molecule of claim 28.

The application's sequence listing, which the Patent Office published only in electronic form, follows.

SEQUENCE LISTING (2267 sequences)

SEQ ID NO: 1 - DNA, 23 bp, Artificial Sequence
  primer_bind: primer useful to clone human growth hormone cDNA
cccaagaattcccttatccaggc

SEQ ID NO: 2 - DNA, 33 bp, Artificial Sequence
  primer_bind: primer useful to clone human growth hormone cDNA
gggaagcttagaagccacaggatccctccacag

SEQ ID NO: 3 - DNA, 16 bp, Artificial Sequence
  misc_structure: synthetic oligonucleotide used to join DNA fragments with non-cohesive ends.
gataaagattcccaac

SEQ ID NO: 4 - DNA, 17 bp, Artificial Sequence
  misc_structure: synthetic oligonucleotide used to join DNA fragments with non-cohesive ends.
aattgttgggaatcttt

SEQ ID NO: 5 - DNA, 17 bp, Artificial Sequence
  misc_structure: synthetic oligonucleotide used to join DNA fragments with non-cohesive ends.
ttaggcttattcccaac

SEQ ID NO: 6 - DNA, 18 bp, Artificial Sequence
  misc_structure: synthetic oligonucleotide used to join DNA fragments with non-cohesive ends.
aattgttgggaataagcc

SEQ ID NO: 7 - protein, 24 aa, Artificial Sequence
  SITE 1)..(19): invertase leader sequence
  SITE 20)..(24): first 5 amino acids of mature human serum albumin
MLLQAFLFLLAGFAAKISADAHKS

SEQ ID NO: 8 - DNA, 21 bp, Artificial Sequence
  misc_structure: synthetic oligonucleotide used to join DNA fragments with non-cohesive ends.
gagatgcacacctgagtgagg

SEQ ID NO: 9 - DNA, 27 bp, Artificial Sequence
  misc_structure: synthetic oligonucleotide used to join DNA fragments with non-cohesive ends.
gatcctgtggcttcgatgcacacaaga

SEQ ID NO: 10 - DNA, 24 bp, Artificial Sequence
  misc_structure: synthetic oligonucleotide used to join DNA fragments with non-cohesive ends.
ctcttgtgtgcatcgaagccacag

SEQ ID NO: 11 - DNA, 30 bp, Artificial Sequence
  misc_structure: synthetic oligonucleotide used to join DNA fragments with non-cohesive ends.
tgtggaagagcctcagaatttattcccaac

SEQ ID NO: 12 - DNA, 31 bp, Artificial Sequence
  misc_structure: synthetic oligonucleotide used to join DNA fragments with non-cohesive ends.
aattgttgggaataaattctgaggctcttcc

SEQ ID NO: 13 - DNA, 47 bp, Artificial Sequence
  misc_structure: synthetic oligonucleotide used to join DNA fragments with non-cohesive ends.
ttaggcttaggtggcggtggatccggcggtggtggatctttcccaac

SEQ ID NO: 14 - DNA, 48 bp, Artificial Sequence
  misc_structure: synthetic oligonucleotide used to join DNA fragments with non-cohesive ends.
aattgttgggaaagatccaccaccgccggatccaccgccacctaagcc

SEQ ID NO: 15 - DNA, 62 bp, Artificial Sequence
  misc_structure: synthetic oligonucleotide used to join DNA fragments with non-cohesive ends.
ttaggcttaggcggtggtggatctggtggcggcggatctggtggcggtggatccttcccaac

SEQ ID NO: 16 - DNA, 63 bp, Artificial Sequence
  misc_structure: synthetic oligonucleotide used to join DNA fragments with non-cohesive ends.
aattgttgggaaggatccaccgccaccagatccgccgccaccagatccaccaccgcctaagcc

SEQ ID NO: 17 - DNA, 1782 bp, Homo sapiens
  CDS (1)..(1755)
gatgcacacaagagtgaggttgctcatcggtttaaagatttgggagaagaaaatttcaaagccttggtgttgattgcctttgctcagtatcttcagcagtgtccatttgaagatcatgtaaaattagtgaatgaagtaactgaatttgcaaaaacatgtgttgctgatgagtcagctgaaaattgtgacaaatcacttcataccctttttggagacaaattatgcacagttgcaactcttcgtgaaacctatggtgaaatggctgactgctgtgcaaaacaagaacctgagagaaatgaatgcttcttgcaacacaaagatgacaacccaaacctcccccgattggtgagaccagaggttgatgtgatgtgcactgcttttcatgacaatgaagagacatttttgaaaaaatacttatatgaaattgccagaagacatccttacttttatgccccggaactccttttctttgctaaaaggtataaagctgcttttacagaatgttgccaagctgctgataaagctgcctgcctgttgccaaagctcgatgaacttcgggatgaagggaaggcttcgtctgccaaacagagactcaaatgtgccagtctccaaaaatttggagaaagagctttcaaagcatgggcagtggctcgcctgagccagagatttcccaaagctgagtttgcagaagtttccaagttagtgacagatcttaccaaagtccacacggaatgctgccatggagatctgcttgaatgtgctgatgacagggcggaccttgccaagtatatctgtgaaaatcaggattcgatctccagtaaactgaaggaatgctgtgaaaaacctctgttggaaaaatcccactgcattgccgaagtggaaaatgatgagatgcctgctgacttgccttcattagctgctgattttgttgaaagtaaggatgtttgcaaaaactatgctgaggcaaaggatgtcttcctgggcatgtttttgtatgaatatgcaagaaggcatcctgattactctgtcgtgctgctgctgagacttgccaagacatatgaaaccactctagagaagtgctgtgccgctgcagatcctcatgaatgctatgccaaagtgttcgatgaatttaaacctcttgtggaagagcctcagaatttaatcaaacaaaactgtgagctttttgagcagcttggagagtacaaattccagaatgcgctattagttcgttacaccaagaaagtaccccaagtgtcaactccaactcttgtagaggtctcaagaaacctaggaaaagtgggcagcaaatgttgtaaacatcctgaagcaaaaagaatgccctgtgcagaagactatctatccgtggtcctgaaccagttatgtgtgttgcatgagaaaacgccagtaagtgacagagtcacaaaatgctgcacagagtccttggtgaacaggcgaccatgcttttcagctctggaagtcgatgaaacatacgttcccaaagagtttaatgctgaaacattcaccttccatgcagatatatgcacactttctgagaaggagagacaaatcaagaaacaaactgcacttgttgagcttgtgaaacacaagcccaaggcaacaaaagagcaactgaaagctgttatggatgatttcgcagcttttgtagagaagtgctgcaaggctgacgataaggagacctgctttgccgaggagggtaaaaaacttgttgctgcaagtcaagctgccttaggcttataacatctacatttaaaagcatctcag

SEQ ID NO: 18 - protein, 585 aa, Homo Sapiens [sequence omitted]

SEQ ID NO: 19 - DNA, 57 bp, Artificial Sequence
  primer_bind: primer used to generate XhoI and ClaI site in pPPC0006
gcctcgagaaaagagatgcacacaagagtgaggttgctcatcgatttaaagatttgg

SEQ ID NO: 20 - DNA, 58 bp, Artificial Sequence
  primer_bind: primer used in generation XhoI and ClaI site in pPPC0006
aatcgatgagcaacctcactcttgtgtgcatctcttttctcgaggctcctggaataag

SEQ ID NO: 21 - DNA, 24 bp, Artificial Sequence
  primer_bind: primer used in generation XhoI and ClaI site in pPPC0006
tacaaacttaagagtccaattagc

SEQ ID NO: 22 - DNA, 29 bp, Artificial Sequence
  primer_bind: primer used in generation XhoI and ClaI site in pPPC0006
cacttctctagagtggtttcatatgtctt

SEQ ID NO: 23 - DNA, 60 bp, Artificial Sequence
  Misc_Structure: Synthetic oligonucleotide used to alter restriction sites in pPPC0007
aagctgccttaggcttataataaggcgcgccggccggccgtttaaactaagcttaattct

SEQ ID NO: 24 - DNA, 60 bp, Artificial Sequence
  Misc_Structure: Synthetic oligonucleotide used to alter restriction sites in pPPC0007
agaattaagcttagtttaaacggccggccggcgcgccttattataagcctaaggcagctt

SEQ ID NO: 25 - DNA, 32 bp, Artificial Sequence
  primer_bind: forward primer useful for generation of albumin fusion protein in which the albumin moiety is N-terminal of the Therapeutic Protein
  Misc_Structure (18): n equals a, t, g, or c
  Misc_Structure (19): n equals a, t, g, or c
  Misc_Structure (20): n equals a, t, g, or c
  Misc_Structure (21): n equals a, t, g, or c
  Misc_Structure (22): n equals a, t, g, or c
  Misc_Structure (23): n equals a, t, g, or c
  Misc_Structure (24): n equals a, t, g, or c
  Misc_Structure (25): n equals a, t, g, or c
  Misc_Structure (26): n equals a, t, g, or c
  Misc_Structure (27): n equals a, t, g, or c
  Misc_Structure (28): n equals a, t, g, or c
  Misc_Structure (29): n equals a, t, g, or c
  Misc_Structure (30): n equals a, t, g, or c
  Misc_Structure (31): n equals a, t, g, or c
  Misc_Structure (32): n equals a, t, g, or c
aagctgccttaggcttannnnnnnnnnnnnnn

SEQ ID NO: 26 - DNA, 51 bp, Artificial Sequence
  primer_bind: reverse primer useful for generation of albumin fusion protein in which the albumin moiety is N-terminal of the Therapeutic Protein
  Misc_Structure (37): n equals a, t, g, or c
  Misc_Structure (38): n equals a, t, g, or c
  Misc_Structure (39): n equals a, t, g, or c
  Misc_Structure (40): n equals a, t, g, or c
  Misc_Structure (41): n equals a, t, g, or c
  Misc_Structure (42): n equals a, t, g, or c
  Misc_Structure (43): n equals a, t, g, or c
  Misc_Structure (44): n equals a, t, g, or c
  Misc_Structure (45): n equals a, t, g, or c
  Misc_Structure (46): n equals a, t, g, or c
  Misc_Structure (47): n equals a, t, g, or c
  Misc_Structure (48): n equals a, t, g, or c
  Misc_Structure (49): n equals a, t, g, or c
  Misc_Structure (50): n equals a, t, g, or c
  Misc_Structure (51): n equals a, t, g, or c
gcgcgcgtttaaacggccggccggcgcgccttattannnnnnnnnnnnnnn

SEQ ID NO: 27 - DNA, 33 bp, Artificial Sequence
  forward primer useful for generation of albumin fusion protein in which the albumin moiety is c-terminal of the Therapeutic Protein
  Misc_Structure (19): n equals a, t, g, or c
  Misc_Structure (20): n equals a, t, g, or c
  Misc_Structure (21): n equals a, t, g, or c
  Misc_Structure (22): n equals a, t, g, or c
  Misc_Structure (23): n equals a, t, g, or c
  Misc_Structure (24): n equals a, t, g, or c
  Misc_Structure (25): n equals a, t, g, or c
  Misc_Structure (26): n equals a, t, g, or c
  Misc_Structure (27): n equals a, t, g, or c
  Misc_Structure (28): n equals a, t, g, or c
  Misc_Structure (29): n equals a, t, g, or c
  Misc_Structure (30): n equals a, t, g, or c
  Misc_Structure (31): n equals a, t, g, or c
  Misc_Structure (32): n equals a, t, g, or c
  Misc_Structure (33): n equals a, t, g, or c
aggagcgtcgacaaaagannnnnnnnnnnnnnn

SEQ ID NO: 28 - DNA, 52 bp, Artificial Sequence
  primer_bind: reverse primer useful for generation of albumin fusion protein in which the albumin moiety is c-terminal of the Therapeutic Protein
  Misc_Structure (38): n equals a, t, g, or c
  Misc_Structure (39): n equals a, t, g, or c
  Misc_Structure (40): n equals a, t, g, or c
  Misc_Structure (41): n equals a, t, g, or c
  Misc_Structure (42): n equals a, t, g, or c
  Misc_Structure (43): n equals a, t, g, or c
  Misc_Structure (44): n equals a, t, g, or c
  Misc_Structure (45): n equals a, t, g, or c
  Misc_Structure (46): n equals a, t, g, or c
  Misc_Structure (47): n equals a, t, g, or c
  Misc_Structure (48): n equals a, t, g, or c
  Misc_Structure (49): n equals a, t, g, or c
  Misc_Structure (50): n equals a, t, g, or c
  Misc_Structure (51): n equals a, t, g, or c
  Misc_Structure (52): n equals a, t, g, or c
ctttaaatcgatgagcaacctcactcttgtgtgcatcnnnnnnnnnnnnnnn

SEQ ID NO: 29 - protein, 24 aa, Artificial Sequence
  signal: signal peptide of natural human serum albumin protein
MKWVSFISLLFLFSSAYSRSLDKR

SEQ ID NO: 30 - DNA, 114 bp, Artificial Sequence
  primer_bind: forward primer useful for generation of PC4:HSA albumin fusion VECTOR
  misc_feature (5)..(10): BamHI retsriction site
  misc_feature (11)..(16): Hind III retsriction site
  misc_feature (17)..(27): Kozak sequence
  misc_feature (25)..(97): cds natural signal sequence of human serum albumin
  misc_feature (75)..(81): XhoI restriction site
  misc_feature (98)..(114): cds first six amino acids of human serum albumin
tcagggatccaagcttccgccaccatgaagtgggtaacctttatttcccttctttttctctttagctcggcttactcgaggggtgtgtttcgtcgagatgcacacaagagtgag

SEQ ID NO: 31 - DNA, 43 bp, Artificial Sequence
  primer_bind: reverse primer useful for generation of PC4:HSA albumin fusion VECTOR
  misc_feature (6)..(11): Asp718 restriction site
  misc_feature (12)..(17): EcoRI restriction site
  misc_feature (15)..(17): reverse complement of stop codon
  misc_feature (18)..(25): AscI restriction site
  misc_feature (18)..(43): reverse complement of DNA sequence encoding last 9 amino acids
gcagcggtaccgaattcggcgcgccttataagcctaaggcagc

SEQ ID NO: 32 - DNA, 46 bp, Artificial Sequence
  primer_bind: forward primer useful for inserting Therapeutic protein into pC4:HSA vector
  Misc_Structure (29): n equals a, t, g, or c
  Misc_Structure (30): n equals a, t, g, or c
  Misc_Structure (31): n equals a, t, g, or c
  Misc_Structure (32): n equals a, t, g, or c
  Misc_Structure (33): n equals a, t, g, or c
  Misc_Structure (34): n equals a, t, g, or c
  Misc_Structure (35): n equals a, t, g, or c
  Misc_Structure (36): n equals a, t, g, or c
  Misc_Structure (37): n equals a, t, g, or c
  Misc_Structure (38): n equals a, t, g, or c
  Misc_Structure (39): n equals a, t, g, or c
  Misc_Structure (40): n equals a, t, g, or c
  Misc_Structure (41): n equals a, t, g, or c
  Misc_Structure (42): n equals a, t, g, or c
  Misc_Structure (43): n equals a, t, g, or c
  Misc_Structure (44): n equals a, t, g, or c
  Misc_Structure (45): n equals a, t, g, or c
  Misc_Structure (46): n equals a, t, g, or c
ccgccgctcgaggggtgtgtttcgtcgannnnnnnnnnnnnnnnnn

SEQ ID NO: 33 - DNA, 55 bp, Artificial Sequence
  primer_bind: reverse primer useful for inserting Therapeutic protein into pC4:HSA vector
  Misc_Structure (38): n equals a, t, g, or c
  Misc_Structure (39): n equals a, t, g, or c
  Misc_Structure (40): n equals a, t, g, or c
  Misc_Structure (41): n equals a, t, g, or c
  Misc_Structure (42): n equals a, t, g, or c
  Misc_Structure (43): n equals a, t, g, or c
  Misc_Structure (44): n equals a, t, g, or c
  Misc_Structure (45): n equals a, t, g, or c
  Misc_Structure (46): n equals a, t, g, or c
  Misc_Structure (47): n equals a, t, g, or c
  Misc_Structure (48): n equals a, t, g, or c
  Misc_Structure (49): n equals a, t, g, or c
  Misc_Structure (50): n equals a, t, g, or c
  Misc_Structure (51): n equals a, t, g, or c
  Misc_Structure (52): n equals a, t, g, or c
  Misc_Structure (53): n equals a, t, g, or c
  Misc_Structure (54): n equals a, t, g, or c
  Misc_Structure (55): n equals a, t, g, or c
agtcccatcgatgagcaacctcactcttgtgtgcatcnnnnnnnnnnnnnnnnnn

SEQ ID NO: 34 - protein, 17 aa, Artificial Sequence
  signal: Stanniocalcin signal peptide
MLQNSAVLLLLVISASA

SEQ ID NO: 35 - protein, 22 aa, Artificial Sequence
  signal: Synthetic signal peptide
MPTWAWWLFLVLLLALWAPARG

SEQ ID NO: 36 - DNA, 23 bp, Artificial Sequence
  primer_bind: Degenerate VH forward primer useful for amplifying human VH domains
caggtgcagctggtgcagtctgg

SEQ ID NO: 37 - DNA, 23 bp, Artificial Sequence
  primer_bind: Degenerate VH forward primer useful for amplifying human VH domains
caggtcaacttaagggagtctgg

SEQ ID NO: 38 - DNA, 23 bp, Artificial Sequence
  primer_bind: Degenerate VH forward primer useful for amplifying human VH domains
gaggtgcagctggtggagtctgg

SEQ ID NO: 39 - DNA, 23 bp, Artificial Sequence
  primer_bind: Degenerate VH forward primer useful for amplifying human VH domains
caggtgcagctgcaggagtcggg

SEQ ID NO: 40 - DNA, 23 bp, Artificial Sequence
  primer_bind: Degenerate VH forward primer useful for amplifying human VH domains
gaggtgcagctgttgcagtctgc

SEQ ID NO: 41 - DNA, 23 bp, Artificial Sequence
  primer_bind: Degenerate VH forward primer useful for amplifying human VH domains
caggtacagctgcagcagtcagg

SEQ ID NO: 42 - DNA, 24 bp, Artificial Sequence
  primer_bind: Degenerate JH reverse primer useful for amplifying human VH domains
tgaggagacggtgaccagggtgcc

SEQ ID NO: 43 - DNA, 24 bp, Artificial Sequence
  primer_bind: Degenerate JH reverse primer useful for amplifying human VH domains
tgaagagacggtgaccattgtccc

SEQ ID NO: 44 - DNA, 24 bp, Artificial Sequence
  primer_bind: Degenerate JH reverse primer useful for amplifying human VH domains
tgaggagacggtgaccagggttcc

SEQ ID NO: 45 - DNA, 24 bp, Artificial Sequence
  primer_bind: Degenerate JH reverse primer useful for amplifying human VH domains
tgaggagacggtgaccgtggtccc

SEQ ID NO: 46 - DNA, 23 bp, Artificial Sequence
  primer_bind: Degenerate Vkappa forward primer useful for amplifying human VL domains
gacatccagatgacccagtctcc

SEQ ID NO: 47 - DNA, 23 bp, Artificial Sequence
  primer_bind: Degenerate Vkappa forward primer useful for amplifying human VL domains
gatgttgtgatgactcagtctcc

SEQ ID NO: 48 - DNA, 23 bp, Artificial Sequence
  primer_bind: Degenerate Vkappa forward primer useful for amplifying human VL domains
gatattgtgatgactcagtctcc

SEQ ID NO: 49 - DNA, 23 bp, Artificial Sequence
  primer_bind: Degenerate Vkappa forward primer useful for amplifying human VL domains
gaaattgtgttgacgcagtctcc

SEQ ID NO: 50 - DNA, 23 bp, Artificial Sequence
  primer_bind: Degenerate Vkappa forward primer useful for amplifying human VL domains
gacatcgtgatgacccagtctcc

SEQ ID NO: 51 - DNA, 23 bp, Artificial Sequence
  primer_bind: Degenerate Vkappa forward primer useful for amplifying human VL domains
gaaacgacactcacgcagtctcc

SEQ ID NO: 52 - DNA, 23 bp, Artificial Sequence
  primer_bind: Degenerate Vkappa forward primer useful for amplifying human VL domains
gaaattgtgctgactcagtctcc

SEQ ID NO: 53 - DNA, 23 bp, Artificial Sequence
  primer_bind: Degenerate Vlambda forward primer useful for amplifying human VL domains
cagtctgtgttgacgcagccgcc

SEQ ID NO: 54 - DNA, 23 bp, Artificial Sequence
  primer_bind: Degenerate Vlambda forward primer useful for amplifying human VL domains
cagtctgccctgactcagcctgc

SEQ ID NO: 55 - DNA, 23 bp, Artificial Sequence
  primer_bind: Degenerate Vlambda forward primer useful for amplifying human VL domains
tcctatgtgctgactcagccacc

SEQ ID NO: 56 - DNA, 23 bp, Artificial Sequence
  primer_bind: Degenerate Vlambda forward primer useful for amplifying human VL domains
tcttctgagctgactcaggaccc

SEQ ID NO: 57 - DNA, 23 bp, Artificial Sequence
  primer_bind: Degenerate Vlambda forward primer useful for amplifying human VL domains
cacgttatactgactcaaccgcc

SEQ ID NO: 58 - DNA, 23 bp, Artificial Sequence
  primer_bind: Degenerate Vlambda forward primer useful for amplifying human VL domains
caggctgtgctcactcagccgtc

SEQ ID NO: 59 - DNA, 23 bp, Artificial Sequence
  primer_bind: Degenerate Vlambda forward primer useful for amplifying human VL domains
aattttatgctgactcagcccca

SEQ ID NO: 60 - DNA, 24 bp, Artificial Sequence
  primer_bind: Degenerate Jkappa reverse primer useful for amplifying human VL domains
acgtttgatttccaccttggtccc

SEQ ID NO: 61 - DNA, 24 bp, Artificial Sequence
  primer_bind: Degenerate Jkappa reverse primer useful for amplifying human VL domains
acgtttgatctccagcttggtccc

SEQ ID NO: 62 - DNA, 24 bp, Artificial Sequence
  primer_bind: Degenerate Jkappa reverse primer useful for amplifying human VL domains
acgtttgatatccactttggtccc

SEQ ID NO: 63 - DNA, 24 bp, Artificial Sequence
  primer_bind: Degenerate Jkappa reverse primer useful for amplifying human VL domains
acgtttgatctccaccttggtccc

SEQ ID NO: 64 - DNA, 24 bp, Artificial Sequence
  primer_bind: Degenerate Jkappa reverse primer useful for amplifying human VL domains
acgtttaatctccagtcgtgtccc

SEQ ID NO: 65 - DNA, 23 bp, Artificial Sequence
  primer_bind: Degenerate Jlambda reverse primer useful for amplifying human VL domains
cagtctgtgttgacgcagccgcc

SEQ ID NO: 66 - DNA, 23 bp, Artificial Sequence
  primer_bind: Degenerate Jlambda reverse primer useful for amplifying human VL domains
cagtctgccctgactcagcctgc

SEQ ID NO: 67 - DNA, 23 bp, Artificial Sequence
  primer_bind: Degenerate Jlambda reverse primer useful for amplifying human VL domains
tcctatgtgctgactcagccacc

SEQ ID NO: 68 - DNA, 23 bp, Artificial Sequence
  primer_bind: Degenerate Jlambda reverse primer useful for amplifying human VL domains
tcttctgagctgactcaggaccc

SEQ ID NO: 69 - DNA, 23 bp, Artificial Sequence
  primer_bind: Degenerate Jlambda reverse primer useful for amplifying human VL domains
cacgttatactgactcaaccgcc

SEQ ID NO: 70 - DNA, 23 bp, Artificial Sequence
  primer_bind: Degenerate Jlambda reverse primer useful for amplifying human VL domains
caggctgtgctcactcagccgtc

SEQ ID NO: 71 - DNA, 23 bp, Artificial Sequence
  primer_bind: Degenerate Jlambda reverse primer useful for amplifying human VL domains
aattttatgctgactcagcccca

SEQ ID NO: 72 - protein, 15 aa, Artificial Sequence
  turn: Linker peptide that may be used to join VH and VL domains in an scFv.
GGGGSGGGGSGGGGS

SEQ ID NO: 73 - protein, 101 aa, Homo sapiens [sequence omitted]

SEQ ID NO: 74 - protein, 58 aa, Homo sapiens
  SITE (24): Xaa equals any of the naturally occurring L-amino acids
RPSLPKCAALVHVPNGPSPHAPPXSGVGAPSEVSESLKCSFVRPLCSDSPGQATSNPL

SEQ ID NO: 75 - protein, 119 aa, Homo sapiens
DLDLMESGVSTHNMSSWTLGIHCEQAGWGLPAQIGAILFCILFQGVLNTLKQVEAPAPDWELLERPPCVCVVLSWSHIESGWGSSTRQSPSNSQVLAPSGKADTLSWRRPRKSGLRVAA

SEQ ID NO: 76 - protein, 90 aa, Homo sapiens
  SITE (5): Xaa equals any of the naturally occurring L-amino acids
VTCQXVLPSPVYLCNYFCKHCILCGRHLLAPSLGFSLSSRPACTSLGCSGVSAPHSRPGCQAQPAGARDPAACPKHLFLGDGVGAAPQEV

SEQ ID NO: 77 - protein, 70 aa, Homo sapiens
  SITE (29): Xaa equals any of the naturally occurring L-amino acids
  SITE (34): Xaa equals any of the naturally occurring L-amino acids
  SITE (37): Xaa equals any of the naturally occurring L-amino acids
MDPAAVALLALSLPCALVGVQWEQAPWGXWRLSXSAXTPETPSWRLCPLRDYPKPGQRSGGDRGSHIRSL

SEQ ID NO: 78 - protein, 194 aa, Homo sapiens
  SITE (3): Xaa equals any of the naturally occurring L-amino acids
  SITE (17): Xaa equals any of the naturally occurring L-amino acids
  SITE (33): Xaa equals any of the naturally occurring L-amino acids
QWXGQGSLCPWYCCPGXVSAVTLLPSWWLLRPXFVLLFLPKCLSSPSCIKYPCCATNYLELGDFTTTACQRPAVDEGLGGMAGPAQGSLAEVGAEAARHWRLGLSHTPWLLGGCILLSSLSSRGCTLGCRPPVSLTGYSWGSLRSWRCPQPPSPRLPPPHTLRPQRFVRVHEILELPGCSFCNIFNICNPVKYQ

SEQ ID NO: 79 - protein, 103 aa, Homo sapiens
MDPAAVALLALSLPCALVGVQWEQAPWGPWRLSLLSPHPRDPIVAPVSTQGLSQAWPEVGRGQREPHRSLYQPLSYHRVGALPSHRVSGLWAPPSCTGPRGHF

SEQ ID NO: 80 - protein, 477 aa, Homo sapiens [sequence omitted]

SEQ ID NO: 81 - protein, 445 aa, Homo sapiens
MAAPTPARPVLTHLLVALFGMGSWAAVNGIWVELPVVVKELPEGWSLPSYVSVLVALGNLGLLVVTLWRRLAPGKDEQVPIRVVQVLGMVGTALLASLWHHVAPVAGQLHSVAFLALAFVLALACCAPNVTFLPFLSHLPPRFLRSFFLGQGLSALLPCVLALVQGVGRLECPPAPINGTPGPPLDFLERFPASTFFWALTALLVASAAAFQGLLLLLPPPPSVPTGELGSGLQVGAPGAEEEVEESSPLQEPPSQAAGTTPGPDPKAYQLLSARSACLLGLLAATNALTNGVLPAVQSFSCLPYGRLAYHLAVVLGSAANPLACFLAMGVLCRSLAGLGGLSLLGVFCGGYLMALAVLSPCPPLVGTSAGVVLVVLSWVLCLGVFSYVKVAASSLLHGGGRPALLAAGVAIQVGSLLGAVAMFPPTSIYHVFHSRKDCADPCDS

SEQ ID NO: 82 - protein, 264 aa, Homo sapiens
  SITE (196): Xaa equals any of the naturally occurring L-amino acids
  SITE (224): Xaa equals any of the naturally occurring L-amino acids
  SITE (233): Xaa equals any of the naturally occurring L-amino acids
MLRLFETFLETAPQLTLVLAIMLQSGRAEYYQWVGICTSFLGISWALLDYHRALRTCLPSKPLLGLGSSVIYFLWNLLLLWPRVLAVALFSALFPSYVALHFLGLWLVLLLWVWLQGTDFMPDPSSEWLYRVTVATILYFSWFNVAEGRTRGRAIIHFAFLLSDSILLVATWVTHSSWLPSGIPLQLWLPVGCGCXFLGLALRLVYYHWLHPSCCWKPDPDQVXGARSLLSPXGYQLPQNRRMTHLAQKFFPKAKDEAASPVKG

SEQ ID NO: 83 - protein, 115 aa, Homo sapiens
  SITE (60): Xaa equals any of the naturally occurring L-amino acids
  SITE (73): Xaa equals any of the naturally occurring L-amino acids
  SITE (75): Xaa equals any of the naturally occurring L-amino acids
  SITE (82): Xaa equals any of the naturally occurring L-amino acids
LPYPGLGGHRGCPLEFFLPSPTPFIQFMKQIFAKSSLCARNIILSLQPGTRPATSLASSXTCTNQSRVRSQMXEXRDAQLWXAPVRTSGISVKLAWPLLLLSRGCFSTKSLVSLV

SEQ ID NO: 84 - protein, 264 aa, Homo sapiens
MLRLFETFLETAPQLTLVLAIMLQSGRAEYYQWVGICTSFLGISWALLDYHRALRTCLPSKPLLGLGSSVIYFLWNLLLLWPRVLAVALFSALFPSYVALHFLGLWLVLLLWVWLQGTDFMPDPSSEWLYRVTVATILYFSWFNVAEGRTRGRAIIHFAFLLSDSILLVATWVTHSSWLPSGIPLQLWLPVGCGCFFLGLALRLVYYHWLHPSCCWKPDPDQVDGARSLLSPEGYQLPQNRRMTHLAQKFFPKAKDEAASPVKG

SEQ ID NO: 85 - protein, 57 aa, Homo sapiens
MNVFLSLPLGSSLPPLLFPPSLPSLFFPLPLYLSFSAPSPATTPGFISLPGHIPSSS

SEQ ID NO: 86 - protein, 49 aa, Homo sapiens
  SITE (26): Xaa equals any of the naturally occurring L-amino acids
CHPQQPSCRIPLFVLFISQTSQHLGXIEGAYVEILGAGSPNTSETIPNN

SEQ ID NO: 87 - protein, 52 aa, Homo sapiens
  SITE (50): Xaa equals any of the naturally occurring L-amino acids
KEPTLKYWGRVPPILLKLFQTIEKEGHLPNSFYEASIILILKPGRDTAKXKK

SEQ ID NO: 88 - protein, 155 aa, Homo sapiens [sequence omitted]

SEQ ID NO: 89 - protein, 91 aa, Homo sapiens
  SITE (41): Xaa equals any of the naturally occurring L-amino acids
VWRRCVSWRSIRAQVTFPEDFLSLSSSVQFQVIHVLLDPGXTGISTDLLASFGLEYHSWLGAEAAGLIVIYHKVARKLPRGVRKAAGGGRV

SEQ ID NO: 90 - protein, 21 aa, Homo sapiens
DLHIKLLEHYCLTSCKKVLQL

SEQ ID NO: 91 - protein, 67 aa, Homo sapiens
  SITE (13): Xaa equals any of the naturally occurring L-amino acids
PQSPQRGCYSMLXVLSVSHPQPNKWRCVVPRGPFSHCLASRRGVLQGYSFVCTCRLVGPEFFSHVQE

SEQ ID NO: 92 - protein, 21 aa, Homo sapiens
DLHIKLLEHYCLTSCKKVLQL

SEQ ID NO: 93 - protein, 67 aa, Homo sapiens [sequence omitted]

SEQ ID NO: 94 - protein, 44 aa, Homo sapiens
MLSSILSQLMVSKPWGVFISFSFISLSFYHAISISSVPSGRQVV

SEQ ID NO: 95 - protein, 150 aa, Homo sapiens
  SITE (12): Xaa equals any of the naturally occurring L-amino acids
  SITE (38): Xaa equals any of the naturally occurring L-amino acids
  SITE (43): Xaa equals any of the naturally occurring L-amino acids
  SITE (145): Xaa equals any of the naturally occurring L-amino acids
CPPPPKRGGIEXELGKLWPTFETFRANRRTMLLEPLGXPGGGXRPFWKRARGVTSEAIVTGRCNHCPDCGKAWREQGESTPSTCPFDPLTCWWLALAKPETGGQEPLSVAAYGGQPSEVKAGQKVEKGLGGTHGEQSTKFTPFVXWHWKI

SEQ ID NO: 96 - protein, 35 aa, Homo sapiens
MVSKPWGVFISFSFISLSFYHAISISSVPSGRQVV

SEQ ID NO: 97 - protein, 13 aa, Homo sapiens
MKSLHGRLLWQSA

SEQ ID NO: 98 - protein, 13 aa, Homo sapiens
MKSLHGRLLWQSA

SEQ ID NO: 99 - protein, 353 aa, Homo sapiens
  SITE (260): Xaa equals any of the naturally occurring L-amino acids
MPWPLLLLLAVSGAQTTRPCFPGCQCEVETFGLFDSFSLTRVDCSGLGPHIMPVPIPLDTAHLDLSSNRLEMVNESVLAGPGYTTLAGLDLSHNLLTSISPTAFSRLRYLESLDLSHNGLTALPAESFTSSPLSDVNLSHNQLREVSVSAFTTHSQGRALHVDLSHNLIHRLVPHPTRAGLPAPTIQSLNLAWNRLHAVPNLRDLPLRYLSLDGNPLAVIGPGAFAGLGGLTHLSLASLQRLPELAPSGFRELPGLQVLXLSGNPKLNWAGAEVFSGLSSLQELDLSGTNLVPLPEALLLHLPALQSVSVGQDVRCRRLVREGTYPRRPGSSPKVALHCVDTRESAARGPTIL

SEQ ID NO: 100 - protein, 353 aa, Homo sapiens
MPWPLLLLLAVSGAQTTRPCFPGCQCEVETFGLFDSFSLTRVDCSGLGPHIMPVPIPLDTAHLDLSSNRLEMVNESVLAGPGYTTLAGLDLSHNLLTSISPTAFSRLRYLESLDLSHNGLTALPAESFTSSPLSDVNLSHNQLREVSVSAFTTHSQGRALHVDLSHNLIHRLVPHPTRAGLPAPTIQSLNLAWNRLHAVPNLRDLPLRYLSLDGNPLAVIGPGAFAGLGGLTHLSLASLQRLPELAPSGFRELPGLQVLDLSGNPKLNWAGAEVFSGLSSLQELDLSGTNLVPLPEALLLHLPALQSVSVGQDVRCRRLVREGTYPRRPGSSPKVALHCVDTRESAARGPTIL

SEQ ID NO: 101 - protein, 285 aa, Homo sapiens
  SITE (259): Xaa equals any of the naturally occurring L-amino acids
  SITE (262): Xaa equals any of the naturally occurring L-amino acids
  SITE (280): Xaa equals any of the naturally occurring L-amino acids
MGFLQLLVVAVLASEHRVAGAAEVFGNSSEGLIEFSVGKFRYFELNRPFPEEAILHDISSNVTFLIFQIHSQYQNTTVSFSPTLLSNSSETGTASGLVFILRPEQSTCTWYLGTSGIQPVQNMAILLSYSERDPVPGGCNLEFDLDIDPNIYLEYNFFETTIKFAPANLGYARGVDPPPCDAGTDQDSRWRLQYDVYQYFLPENDLTEEMLLKHLQRMVSVPQVKASALKVVTLTANDKTSVSFSSLPGQGVIYNVIVXGPXSKYICCLHSCSHIRLQLXRAGRG

SEQ ID NO: 102 - protein, 417 aa, Homo sapiens
LFLFSKYTHSIRIQLFPFLRGVDPPPCDAGTDQDSRWRLQYDVYQYFLPENDLTEEMLLKHLQRMVSVPQVKASALKVVTLTANDKTSVSFSSLPGQGVIYNVIVWDPFLNTSAAYIPAHTYACSFEAGEGSCASLGRVSSKVFFTLFALLGFFICFFGHRFWKTELFFIGFIIMGFFFYILITRLTPIKYDVNLILTAVTGSVGGMFLVAVWWRFGILSICMLCVGLVLGFLISSVTFFTPLGNLKIFHDDGVFWVTFSCIAILIPVVFMGCLRILNILTCGVIGSYSVVLAIDSYWSTSLSYITLNVLKRALNKDFHRAFTNVPFQTNDFIILAVWGMLAVSGITLQIRRERGRPFFPPHPYKLWKQERERRVTNILDPSYHIPPLRERLYGRLTQIKGLFQKEQPAGERTPLLL

SEQ ID NO: 103 - protein, 363 aa, Homo sapiens
MGFLQLLVVAVLASEHRVAGAAEVFGNSSEGLIEFSVGKFRYFELNRPFPEEAILHDISSNVTFLIFQIHSQYQNTTVSFSPTLLSNSSETGTASGLVFILRPEQSTCTWYLGTSGIQPVQNMAILLSYSERDPVPGGCNLEFDLDIDPNIYLEYNFFETTIKFAPANLGYARGVDPPPCDAGTDQDSRWRLQYDVYQYFLPENDLTEEMLLKHLQRMVSVPQVKASALKVVTLTANDKTSVSFSSLPGQGVIYNVIVWDLFLNTSAAYIPAHTYACSFEAGEGSCASLGRVSSKVFFTLFALLGFFICFFGQRFWKTELFFIGFIIMGFFFYILITRLTPIKYDAEHTDLWSHWLLFGGFSH

SEQ ID NO: 104 - protein, 79 aa, Homo sapiens
  SITE (42): Xaa equals any of the naturally occurring L-amino acids
  SITE (49): Xaa equals any of the naturally occurring L-amino acids
  SITE (69): Xaa equals any of the naturally occurring L-amino acids
  SITE (76): Xaa equals any of the naturally occurring L-amino acids
MLVKGEGVRLVLRLLGRNGLHLAPLPALLLHFLMLPLSAPVXYSLPAGXCLQGTGSSSFYSVKFSGSLXGGKGKPXNWP

SEQ ID NO: 105 - protein, 71 aa, Homo sapiens [sequence omitted]

SEQ ID NO: 106 - protein, 31 aa, Homo sapiens
MFEALWATDYLCCLFLFVSFFRPLQKCKNHS

SEQ ID NO: 107 - protein, 26 aa, Homo sapiens [sequence omitted]

SEQ ID NO: 108 - protein, 31 aa, Homo sapiens; identical to SEQ ID NO: 106

SEQ ID NO: 109 - protein, 118 aa, Homo sapiens
MEFVSGGKTEILMLFTLLVSCYVFLPLALPCFAFFFSFWPIPFYMCPQQRWGDTEHPGSFPALLGRPRLQAPAVETLKGNKQPSTLPDPRLFREAAHFHPGPRTPSLCPTRISLNGRD

SEQ ID NO: 110 - protein, 157 aa, Homo sapiens
SCLPPLPLNLPLPPCLCPLLQLNAAMTRKEKTKEGQRAAQFSAGADAGSGGGLSRQKDTKRPMLLVIHDVVLELLTSSDCHANPRKYPTCQKSEVLGVSIYVSICPSTRPRDKNKTKKRCQVLEAVLVSKPSGSCHQGSFEIVPHVKGNLAFTSSNH

SEQ ID NO: 111 - protein, 118 aa, Homo sapiens; identical to SEQ ID NO: 109

SEQ ID NO: 112 - protein, 74 aa, Homo sapiens
LALHRCSLSCLQVSVCGVGYGEENLHGGPPGLVVQAVPRHILIPSMGHLKMNNNSQNFCEIKSSFKRSHLSKRF

SEQ ID NO: 113 - protein, 199 aa, Homo sapiens
MKSGLWYFFLFCLRIKVLTGEINGSANYEMFIFHNGGVQILCKYPDIVQQFKMQLLKGGQILCDLTKTKGSGNTVSIKSLKFCHSQLSNNSVSFFLYNLDHSHANYYFCNLSIFDPPPFKVTLTGGYLHIYESQLCCQLKFWLPIGCAAFVVVCILGCILICWLTKKKYSSSVHDPNGEYMFMRAVNTAKKSRLTDVTL

SEQ ID NO: 114 - protein, 199 aa, Homo sapiens; identical to SEQ ID NO: 113

SEQ ID NO: 115 - protein, 91 aa, Homo sapiens
  SITE (12): Xaa equals any of the naturally occurring L-amino acids
  SITE (49): Xaa equals any of the naturally occurring L-amino acids
  SITE (51): Xaa equals any of the naturally occurring L-amino acids
MVLRGWGLAWSXSPVVCGYSGDMKGVCWGRSDHSLLPSEILLPPAPCPXSXVLHNPPPTPHLPSPVLVRIQEAPTWAQRSSLGASPLHKGD

SEQ ID NO: 116 - protein, 6 aa, Homo sapiens
WALPMS

SEQ ID NO: 117 - protein, 14 aa, Homo sapiens
GCSLYNSFNNLLCL

SEQ ID NO: 118 - protein, 4 aa, Homo sapiens
LREL

SEQ ID NO: 119 - protein, 91 aa, Homo sapiens
MVLRGWGLAWSLSPVVCGYSGDMKGVCWGRSDHSLLPSEILLPPAPCPSSAVLHNPPPTPHLPSPVLVRIQEAPTWAQRSSLGASPLHKGD

SEQ ID NO: 120 - protein, 75 aa, Homo sapiens
EDMPRRKEELTDYQKKKVILQNLKHSLFLSLLSHYFYSNPLEYLHFASEQRDKFFSHHVCTGVVLILDIAGTNFS

SEQ ID NO: 121 - protein, 56 aa, Homo sapiens
MMIYFALLLASLFFLLKVKSHFGCKNVTTTSARIFLKPLCTPKSIFPLSRYGRMSS

SEQ ID NO: 122 - protein, 56 aa, Homo sapiens; identical to SEQ ID NO: 121

SEQ ID NO: 123 - protein, 59 aa, Homo sapiens [sequence omitted]

SEQ ID NO: 124 - protein, 114 aa, Homo sapiens
  SITE (7): Xaa equals any of the naturally occurring L-amino acids
  SITE (22): Xaa equals any of the naturally occurring L-amino acids
  SITE (24): Xaa equals any of the naturally occurring L-amino acids
  SITE (111): Xaa equals any of the naturally occurring L-amino acids
QRAMACXFGILLIVSATLCFGXLXGFLMTLPQKRKSFQSKSFVRLKDVTAYMWEKVLTFLRLETPKLEEAEMVENHNYYLDEFANLLDELLMKINGLSDSLQLPLLEKTSXNTG

SEQ ID NO: 125 - protein, 85 aa, Homo sapiens
  SITE (81): Xaa equals any of the naturally occurring L-amino acids
  SITE (84): Xaa equals any of the naturally occurring L-amino acids
MDILMLLLLLCVIYGRFSQDEYSLNQAIRKEFTRNARNCLGGLRNIADWWDWSLTTLLDGLYPGGTPSARVPGASAWSSWXKMXT

SEQ ID NO: 126 - protein, 561 aa, Homo sapiens
MDILMLLLLLCVIYGRFSQDEYSLNQAIRKEFTRNARNCLGGLRNIADWWDWSLTTLLDGLYPGGTPSARVPGAQPGALGGKCYLIGSSVIRQLKVFPRHLCKPPRPFSALIEDSIPTCSPEVGGPENPYLIDPENQNVTLNGPGGCGTREDCVLSLGRTRTEAHTALSRLRASMWIDRSTRAVSVHFTLYNPPTQLFTSVSLRVEILPTGSLVPSSLVESFSIFRSDSALQYHLMLPQLVFLALSLIHLCVQLYRMMDKGVLSYWRKPRNWLELSVVGVSLTYYAVSGHLVTLAGDVTNQFHRGLCRAFMDLTLMASWNQRARWLRGILLFLFTLKCVYLPGIQNTMASCSSMMRHSLPSIFVAGLVGALMLAALSHLHRFLLSMWVLPPGTFTDAFPGLLFHFPRRSQKDCLLGLSKSDQRAMACYFGILLIVSATLCFGMLRGFLMTLPQKRKSFQSKSFVRLKDVTAYMWEKVLTFLRLETPKLEEAEMVENHNYYLDEFANLLDELLMKINGLSDSLQLPLLEKTSNNTGEARTEESPLVDISSYQAAEPADIKDF

SEQ ID NO: 127 - protein, 88 aa, Homo sapiens
  SITE (1): Xaa equals any of the naturally occurring L-amino acids
  SITE (19): Xaa equals any of the naturally occurring L-amino acids
  SITE (81): Xaa equals any of the naturally occurring L-amino acids
XHKTFPSEGSSCLSSVTLXTTAQAYFTLPPPTHHCPLSATKPHYSSNDASLVSGKPIWCTKMLCNTKWLLPLILLNNVNSXRINFMLC

SEQ ID NO: 128 - protein, 56 aa, Homo sapiens
MWKVLRPSLFTAGLFTASFFYSDLKVSTELMKLQHMVFKSFPLKCTLENWVPQPHY

SEQ ID NO: 129 - protein, 58 aa, Homo sapiens [sequence omitted]

SEQ ID NO: 130 - protein, 32 aa, Homo sapiens
CLETFWSLYLGGWGMVGCVCYWHPVNRSQGCR

SEQ ID NO: 131 - protein, 199 aa, Homo sapiens
  SITE (142): Xaa equals any of the naturally occurring L-amino acids
MKLGCVLMAWALYLSLGVLWVAQMLLAASFETLQCEGPVCTEESSCHTEDDLTDAREAGFQVKAYTFSEPFHLIVSYDWLILQGPAKPVFEGDLLVLRCQAWQDWPLTQVTFYRDGSALGPPGPNREFSITVVQKADSGHYXCSGIFQSPGPGIPETASVVAITVQELFPAPILLLQGWKDSAKQGGSPQNSRSPQLQK

SEQ ID NO: 132 - protein, 2 aa, Homo sapiens
SW

SEQ ID NO: 133 - protein, 359 aa, Homo sapiens
MKLGCVLMAWALYLSLGVLWVAQMLLAASFETLQCEGPVCTEESSCHTEDDLTDAREAGFQVKAYTFSEPFHLIVSYDWLILQGPAKPVFEGDLLVLRCQAWQDWPLTQVTFYRDGSALGPPGPNREFSITVVQKADSGHYHCSGIFQSPGPGIPETASVVAITVQELFPAPILRAVPSAEPQAGGPMTLSCQTKLPLQRSAARLLFSFYKDGRIVQSRGLSSEFQIPTASEDHSGSYWCEAATEDNQVWKQSPQLEIRVQGASSSAAPPTLNPAPQKSAAPGTAPEEAPGPLPPPPTPSSEDPGFSSPLGMPDPHLYHQMGLLLKHMQDVRVLLGHLLMELRELSGHRKPGTTKATAE

SEQ ID NO: 134 - protein, 5 aa, Homo sapiens
MSRLL

SEQ ID NO: 135 - protein, 5 aa, Homo sapiens
MSRLL

SEQ ID NO: 136 - protein, 63 aa, Homo sapiens [sequence omitted]

SEQ ID NO: 137 - protein, 438 aa, Homo sapiens
  SITE (42): Xaa equals any of the naturally occurring L-amino acids
LTITVHDPNAAQWYYGMSWGLRLYIPGFDVGTMFTIQKKILXSWSPPKPIRPLTDLGDPIFQKHPDKVDLTVPQPFLVPRPQLQQQHLQPSLMSILGGVHHLLNLTQPKLAQDCWLCLKAKPPYYVGLGVEATLKRGPLSCHTRPRALTIGDVSGNASCLISTGYNLSASPFQATCNQSLLTYISTSVSYQAPNNTWLACTSGLTRCINGTEPGPLLCVLVHVLPQVYVYSGPEGRQLIAPPELHPRLHQAVPLLVPLLAGLSIAGSAAIGTAALVQGETGLISLSQQVDADFSNLQSAIDILHSQVESLAEVVLQNCRCLDLLFLSQGGLCAALGESCCFYANQSGVIKGTVKKVRENLDRHQQERENNIPWYQSMFNWNPWLTTLITGLAGPLLILLLSLIFGPCILNSFLNFIKQRIASVKLTYLKTQYDTLVNN

SEQ ID NO: 138 - protein, 438 aa, Homo sapiens
LTITVHDPNAAQWYYGMSWGLRLYIPGFDVGTMFTIQKKILVSWSPPKPIRPLTDLGDPIFQKHPDKVDLTVPQPFLVPRPQLQQQHLQPSLMSILGGVHHLLNLTQPKLAQDCWLCLKAKPPYYVGLGVEATLKRGPLSCHTRPRALTIGDVSGNASCLISTGYNLSASPFQATCNQSLLTYISTSVSYQAPNNTWLACTSGLTRCINGTEPGPLLCVLVHVLPQVYVYSGPEGRQLIAPPELHPRLHQAVPLLVPLLAGLSIAGSAAIGTAALVQGETGLISLSQQVDADFSNLQSAIDILHSQVESLAEVVLQNCRCLDLLFLSQGGLCAALGESCCFYANQSGVIKGTVKKVRENLDRHQQERENNIPWYQSMFNWNPWLTTLITGLAGPLLILLLSLIFGPCILNSFLNFIKQRIASVKLTYLKTQYDTLVNN

SEQ ID NO: 139 - protein, 62 aa, Homo sapiens
MFCRNWRCEFMMLSHNTAVMICSFSQNDFHAALCCSSVSELPYLFLVCSTYKCSCHAVLFFC

SEQ ID NO: 140 - protein, 62 aa, Homo sapiens; identical to SEQ ID NO: 139

SEQ ID NO: 141 - protein, 76 aa, Homo sapiens
INFTYKRLSLDFIYIYMCVCVCVCVCVCVCVYLKRTCASIKGNKMREYIIDFVKSKYLNYGFSIFKNSCSFCTYFF

SEQ ID NO: 142 - protein, 42 aa, Homo sapiens
MFLFITFTILAIFIIEPRNLRVDLNLIKFQTSWPKTLVEEQN

SEQ ID NO: 143 - protein, 42 aa, Homo sapiens; identical to SEQ ID NO: 142

SEQ ID NO: 144 - protein, 23 aa, Homo sapiens
AWIQCTLLLYPRRTSQGIHQVPG

SEQ ID NO: 145 - protein, 20 aa, Homo sapiens
LLMRQPWVGQGWGPVVEETC

SEQ ID NO: 146 - protein, 322 aa, Homo sapiens
  SITE (131): Xaa equals any of the naturally occurring L-amino acids
  SITE (185): Xaa equals any of the naturally occurring L-amino acids
  SITE (218): Xaa equals any of the naturally occurring L-amino acids
  SITE (220): Xaa equals any of the naturally occurring L-amino acids
  SITE (250): Xaa equals any of the naturally occurring L-amino acids
  SITE (312): Xaa equals any of the naturally occurring L-amino acids
MALPPGPAALRHTLLLLPALLSSGWGELEPQIDGQTWAERALRENERHAFTCRVAGGPGTPRLAWYLDGQLQEASTSRLLSVGGEAFSGGTSTFTVTAHRAQHELNCSLQDPRSGRSANASVILNVQFKPXIAQVGAKYQEAQGPGLLVVLFALVRANPPANVTWIDQDGPVTVNTSDFLVLDAXNYPWLTNHTVQLQLRSLAHNLSVVATNDVGVTXAXLPAPGPSRHPSLISSDSNNLKLNNVRLPRXNMSLPSNLQLNDLTPDSRAVKPADRQMAQNNSRPELLDPEPGGLLTSQGFIRLPVLGYIYRXSSVSSDEIWL

SEQ ID NO: 147 - protein, 322 aa, Homo sapiens
MALPPGPAALRHTLLLLPALLSSGWGELEPQIDGQTWAERALRENERHAFTCRVAGGPGTPRLAWYLDGQLQEASTSRLLSVGGEAFSGGTSTFTVTAHRAQHELNCSLQDPRSGRSANASVILNVQFKPEIAQVGAKYQEAQGPGLLVVLFALVRANPPANVTWIDQDGPVTVNTSDFLVLDAQNYPWLTNHTVQLQLRSLAHNLSVVATNDVGVTSASLPAPGPSRHPSLISSDSNNLKLNNVRLPRENMSLPSNLQLNDLTPDSRAVKPADRQMAQNNSRPELLDPEPGGLLTSQGFIRLPVLGYIYRVSSVSSDEIWL

SEQ ID NO: 148 - protein, 25 aa, Homo sapiens
MISLLWTLKLFSRNLDYSQKRKSWC

SEQ ID NO: 149 - protein, 25 aa, Homo sapiens
MISLLWTLKLFSRNLDYSQKRKSWC

SEQ ID NO: 150 - protein, 18 aa, Homo sapiens
TKSSDFGGGCRNASSSCC

SEQ ID NO: 151 - protein, 26 aa, Homo sapiens
GCFKIVLFFKLVIFAKLFVFVVSINM

SEQ ID NO: 152 - protein, 18 aa, Homo sapiens
TKSSDFGGGCRNASSSCC

SEQ ID NO: 153 - protein, 143 aa, Homo sapiens [sequence omitted]

SEQ ID NO: 154 - protein, 101 aa, Homo sapiens
  SITE (91): Xaa equals any of the naturally occurring L-amino acids
  SITE (93): Xaa equals any of the naturally occurring L-amino acids
  SITE (99): Xaa equals any of the naturally occurring L-amino acids
WESLGLMFLCGPHLTRLLLFLFTLGFCAFINIVLSFPLVCIPFCLGRLYFLLLTEKPHQEACPGDELGTGHLHIGLGAVRLQGPDNMRNEXSXIVVGDXGL

SEQ ID NO: 155 - protein, 35 aa, Homo sapiens
MLNDGKVWVSCFCVVLTSLDFCSFCSLWASVLSLI

SEQ ID NO: 156 - protein, 114 aa, Homo sapiens [sequence omitted]

SEQ ID NO: 157 - protein, 26 aa, Homo sapiens
MCVSPVSVCPFLPSLHFINNWCNVSS

SEQ ID NO: 158 - protein, 106 aa, Homo sapiens
  SITE (36): Xaa equals any of the naturally occurring L-amino acids
GSDGPRERAPVAWLSHSILSLILNKYFLWGFFFFLXAVVCFKLTTWKKHLGYLWFSCLVPASTPTPFESGDSFFCVETRWPRQEVKAAIRKALGTLVPVARLQVTS

SEQ ID NO: 159 - protein, 201 aa, Homo sapiens
  SITE (10): Xaa equals any of the naturally occurring L-amino acids
  SITE (19): Xaa equals any of the naturally occurring L-amino acids
LSSLLPQRLXEPSSSSPGXRTWQLSQKSRGPSRASSMSVLNSLRSSSWWPRLHTHTSMPESPVKRRCLPGVFSLLSGAPCSELSSFSSSSLHSASLSRKAPGSSSPRPATEPLGSIPGALVAARSTGRSEGSGSAMLGGLVLLLLGSDKGLLCAPWDPLVGSMPGGLPPAGPHCGGSSCCCCSWKALYGGGGVGGRFTTSS

SEQ ID NO: 160 - protein, 52 aa, Homo sapiens
MALLLLQALPSPLSARAEPPQDKEACVGTNNQSYICDTGHCCGQSQCCKLLL

SEQ ID NO: 161 - protein, 118 aa, Homo sapiens
LLLLQALPSPLSARAEPPQDKEACVGTNNQSYICDTGHCCGQSQCCNYYYELWWFWLVWTIIIILSCCCVCHHRRAKHRLQAQQRQHEINLIAYREAHNYSALPFYFRFLPNYLLPPL

SEQ ID NO: 162 - protein, 363 aa, Homo sapiens
MERRRLLGGMALLLLQALPSPLSARAEPPQDKEACVGTNNQSYICDTGHCCGQSQCCNYYYELWWFWLVWTIIIILSCCCVCHHRRAKHRLQAQQRQHEINLIAYREAHNYSALPFYFRFLPNYLLPPYEEVVNRPPTPPPPYSAFQLQQQQLLPPQCGPAGGSPPGIDPTRGSQGAQSSPLSEPSRSSTRPPSIADPDPSDLPVDRAATKAPGMEPSGSVAGLGELDPGAFLDKDAECREELLKDDSSEHGAPDSKEKTPGRHRRFTGDSGIEVCVCNRGHHDDDLKEVNTLIDDALDGPLDFCDSCHVRPPGDEEEGLCQPSEEQAREPGHPHLPRPPACLLLNTINEQDSPNSQSNSSPS

SEQ ID NO: 163 - protein, 199 aa, Homo sapiens
  SITE (2): Xaa equals any of the naturally occurring L-amino acids
  SITE (6): Xaa equals any of the naturally occurring L-amino acids
  SITE (14): Xaa equals any of the naturally occurring L-amino acids
  SITE (34): Xaa equals any of the naturally occurring L-amino acids
  SITE (51): Xaa equals any of the naturally occurring L-amino acids
QXKPPXPAAPAAPXAPAPLEKPIRSHEATGGGEXACGVTGASTPEGTAPPXPAAPAPPKGEKEGQRPTQPVYQIQNRGMGTAAPAAMDRELGLGSTRLGTGVSSQILTASSVSCFLQSPAVVGQAKLLPPERMKHSIKLVDDQMNWCDSAIEVPRGPALPELPHILHPLIFHLSVGNTRLEGFEATYSSERGWYQNILT

SEQ ID NO: 164 - protein, 21 aa, Homo sapiens
MKNSFFTVSWALTCSFSWATV

SEQ ID NO: 165 - protein, 21 aa, Homo sapiens
MKNSFFTVSWALTCSFSWATV

SEQ ID NO: 166 - protein, 39 aa, Homo sapiens
MPLFRTFKQLGLFLFLIIPIICSSLPPLGPVQSFLGCLY

SEQ ID NO: 167 - protein, 50 aa, Homo sapiens
MLLLVVTLVNLSIYKLIKLVTALSKKLGAKGVLKNAHFMRCNCGEMRTRS

SEQ ID NO: 168 - protein, 2 aa, Homo sapiens
LL

SEQ ID NO: 169 - protein, 69 aa, Homo sapiens
  SITE (6): Xaa equals any of the naturally occurring L-amino acids
  SITE (13): Xaa equals any of the naturally occurring L-amino acids
  SITE (51): Xaa equals any of the naturally occurring L-amino acids
WYQGKXDLKGLGXVLDGSDGMAGGIPEGMAFTLYLGIWLSSPFPDCCIAFXFAYSSSPLSSGDTFQGPQ

SEQ ID NO: 170 - protein, 135 aa, Homo sapiens
  SITE (33): Xaa equals any of the naturally occurring L-amino acids
  SITE (129): Xaa equals any of the naturally occurring L-amino acids
AKMPWTCSVSDPTSCDSQAQKMPGVRASRQPGXGRQCLLLLHQVQGIWLKACIFPGHKLPEPLKWEARQFQTNLFSTHHSTFKVCLLLLPVHPPSLQFFHSLTSERVPGGSMVNKLTCMLQKKKKKKIXAVRKGI

SEQ ID NO: 171 - protein, 50 aa, Homo sapiens; identical to SEQ ID NO: 167

SEQ ID NO: 172 - protein, 77 aa, Homo sapiens [sequence omitted]

SEQ ID NO: 173 - protein, 77 aa, Homo sapiens [sequence omitted]

SEQ ID NO: 174 - protein, 56 aa, Homo sapiens
CDVKPADVKDIGGTVEASCMNFSWPAPTAQVHTRKRRVWACLRVDVSSEVRPGKAL

SEQ ID NO: 175 - protein, 68 aa, Homo sapiens
  SITE (44): Xaa equals any of the naturally occurring L-amino acids
  SITE (57): Xaa equals any of the naturally occurring L-amino acids
MAQSRVLLLLLLLPPQLAPGTCACREGPRIWPNGGHSLSPEENXLRKKSRLLLIEAXKKPGAWAQAAV

SEQ ID NO: 176 - protein, 85 aa, Homo sapiens
  SITE (26): Xaa equals any of the naturally occurring L-amino acids
MAQSRVLLLLLLLPPQLHLGPVLAVXAPGFGRSGGHSLSPEENEFAEEEPVLVLSPEEPGPGPAAVSCPRDCACSQEGVVDCGGY

SEQ ID NO: 177 - protein, 14 aa, Homo sapiens
MIYQIYGIICSLFP

SEQ ID NO: 178 - protein, 31 aa, Homo sapiens
GPFCDVTTLHLPGLLCTQCSLDPVDLYLWRS

SEQ ID NO: 179 - protein, 14 aa, Homo sapiens
MIYQIYGIICSLFP

SEQ ID NO: 180 - protein, 71 aa, Homo sapiens
  SITE (71): Xaa equals any of the naturally occurring L-amino acids
TMGPGDRHRLPVYLGHCLGCLESGLLAQILPLLGQGRPFMDSLIRVAAERRAGQVLKGTLKRFSERQGRRX

SEQ ID NO: 181 - protein, 204 aa, Homo sapiens
  SITE (1): Xaa equals any of the naturally occurring L-amino acids
  SITE (5): Xaa equals any of the naturally occurring L-amino acids
  SITE (8): Xaa equals any of the naturally occurring L-amino acids
XPSLXGTXAGGSTAVAAALELVDPPGCRNSARAAAELSLLEKSLGLSKGNKYSAQGERQIPVLQTNNGPSLTGLTTIAAHLVKQANKEYLLGSTAEEKAIVQQWLEYRVTQVDGHSSKNDIHTLLKDLNSYLEDKVYLTGYNFTLADILLYYGLHRFIVDLTVQEKEKYLNVSRWFCHIQHYPGIRQHLSSVVFIKNRLYTNSH

SEQ ID NO: 182 - protein, 54 aa, Homo sapiens
MTSPLARLLLPFWCHTLGTMALGTPNPGAMAWGAVGEPNPGAWTVPLGAFLAGR

SEQ ID NO: 183 - protein, 54 aa, Homo sapiens; identical to SEQ ID NO: 182

SEQ ID NO: 184 - protein, 1 aa, Homo sapiens
S

SEQ ID NO: 185 - protein, 3 aa, Homo sapiens
LLC

SEQ ID NO: 186 - protein, 1 aa, Homo sapiens
S

SEQ ID NO: 187 - protein, 5 aa, Homo sapiens
AGTWS

SEQ ID NO: 188 - protein, 45 aa, Homo sapiens
MAGVWNTIALWFLSVFGVISAPTTGTSPTSCRCVGPRPPGCGPAG

SEQ ID NO: 189 - protein, 46 aa, Homo sapiens
  SITE (21): Xaa equals any of the naturally occurring L-amino acids
LINVTNVGIILAVSQPLDDIXEFIIEKRSDYNKYRKENMWLPLNPY

SEQ ID NO: 190 - protein, 304 aa, Homo sapiens
  SITE (15): Xaa equals any of the naturally occurring L-amino acids
  SITE (30): Xaa equals any of the naturally occurring L-amino acids
  SITE (32): Xaa equals any of the naturally occurring L-amino acids
  SITE (187): Xaa equals any of the naturally occurring L-amino acids
MLQFQRTWKYKGEFXLHQGNAERHFMQVTXVXEISTGKRDNEFSNSGRSIPLKSVFLTQQKVPTIQQVHKFDIYDKLFPQNSVIIEYKRLHAEKESLIGNECEEFNQSTYLSKDIGIPPGEKPYESHDFSKLLSFHSLFTQHQTTHFGKLPHGYDECGDAFSCYSFFTQPQRIHSGEKPYACNDCGXAFSPTSFSVNIKELILGRNLMNVRNVTKLSDRVLTLLNIRGSTLERNRLRAMNVGRPLAVMPSLLNIREFTQVRNHMNVKNVIKPSDRVLTLINIRGFTLERNPMNVISVEKPSADA

SEQ ID NO: 191 - protein, 336 aa, Homo sapiens
MDTMNVVMPLAVTHSLLNLREFTVVEKPYACNDCGKAFSHDFFLSEHQRTHIGEKPYECKECNKAFRQSAHLAQHQRIHTGEKPFACNECGKAFSRYAFLVEHQRIHTGEKPYECKECNKAFRQSAHLNQHQRIHTGEKPYECNQCGKAFSRRIALTLHQRIHTGEKPFKCSECGKTFGYRSHLNQHQRIHTGEKPYECIKCGKFFRTDSQLNRHHRIHTGERPFECSKCGKAFSDALVLIHHKRSHAGEKPYECNKCGKAFSCGSYLNQHQRIHTGEKPYECSECGKAFHQILSLRLHQRIHAGEKPYKCNECGNNFSCVSALRRHQRIHNRETL

SEQ ID NO: 192 - protein, 54 aa, Homo sapiens
LAATRKFFLSSHSSSCKKGAMSQKEAPFHRQRLHRERGNRRLGNGGEWGRNWVQ

SEQ ID NO: 193 - protein, 27 aa, Homo sapiens
MHQLFGLFVTLMFASVGGGLGGIILVL

SEQ ID NO: 194 - protein, 106 aa, Homo sapiens
MPGVLGALLGVLVAGLATHEAYGDGLESVFPLIAEGQRSATSQAMHQLFGLFVTLMFASVGGGLGGIILVLCLLDPCALWHWVAPSSMVGGREASQILPYHHQGSC

SEQ ID NO: 195 - protein, 60 aa, Homo sapiens
  SITE (3): Xaa equals any of the naturally occurring L-amino acids
  SITE (17): Xaa equals any of the naturally occurring L-amino acids
NLXCCEPLKGTEIVHLXSSDFKAVACRCSQLNKALPSTTLRGFVCGSSCYISWFPNQETR

SEQ ID NO: 196 - protein, 82 aa, Homo sapiens
  SITE (26): Xaa equals any of the naturally occurring L-amino acids
  SITE (28): Xaa equals any of the naturally occurring L-amino acids
PGNEVTDGQPRQPLRRLRLPCGASLXRXPASPSDAIQRALPGRKLPRWNASPEQRVAVPCGGLTQWLNTGKELALGVRTSET

SEQ ID NO: 197 - protein, 94 aa, Homo sapiens
  SITE (2): Xaa equals any of the naturally occurring L-amino acids
RXPIFIGENFYPPVRGRVGMSACQGGGGGGGGGGGGGGGGGGGGGGGGGGGGVDKLPCLTMCWCGNGAQPARLKVDGIPTGQRKSYADTPAWPG

SEQ ID NO: 198 - protein, 257 aa, Homo sapiens
  SITE (27): Xaa equals any of the naturally occurring L-amino acids
MTAAVFFGCAFIAFGPALALYVFTIAXEPLRIIFLIAGAFFWLVSLLISSLVWFMARVIIDNKDGPTQKYLLIFGAFVSVYIQEMFRFAYYKLLKKASEGLKSINPGETAPSMRLLAYVSGLGFGIMSGVFSFVNTLSDSLGPGTVGIHGDSPQFFLYSAFMTLVIILLHVFWGIVFFDGCEKKKWGILLIVLLTHLLVSAQTFISSYYGINLASAFIILVLMGTWAFLAAGGSCRSLKLCLLCQDKNFLLYNQRSR

SEQ ID NO: 199 - protein, 257 aa, Homo sapiens [sequence omitted]

SEQ ID NO: 200 - protein, 36 aa, Homo sapiens
  SITE (8): Xaa equals any of the naturally occurring L-amino acids
  SITE (12): Xaa equals any of the naturally occurring L-amino acids
  SITE (16): Xaa equals any of the naturally occurring L-amino acids
  SITE (18): Xaa equals any of the naturally occurring L-amino acids
  SITE (19): Xaa equals any of the naturally occurring L-amino acids
  SITE (23): Xaa equals any of the naturally occurring L-amino acids
WRHLTVSXGLQXRLSXRXXWEGXPRSTTAAGWGRTG

SEQ ID NO: 201 - protein, 21 aa, Homo sapiens
HLSLPRLLWTLQIPQCPQLQD

SEQ ID NO: 202 - protein, 78 aa, Homo sapiens
DPQNIYWEHLSIRGFIWWLRCLVINVVLFILLFFLTTPAIIITTMDKFNVTKPVEYLNVRPHAPVTFHAGSQHTDTRP

SEQ ID NO: 203 - protein, 318 aa, Homo sapiens
MHKCYTFLIFMVLLLPSLGLSSLDLFFRWLFDKKFLAEAAIRFECVFLPDNGAFFVNYVIASAFIGNAMDLLRIPGLLMYMIRLCLARSAAERRNVKRHQAYEFRFGAAYAWMMCVFTVVMTYSITCPIIVPFGLMYMLLKHLVDRYNLYYAYLPAKLDKKIHSGAVNQVVAAPILCLFWLLFFSTMRTGFLAPTSMFTFVVLVITIVICLCHVCFGHFKYLSAHNYKIEHTETDTVDPRSNGRPPTAAAVPKSAKYIAQVLQDSEVDGDGDGAPGSSGDEPPSSSSQDEELLMPPDALTDTDFQSCEDSLIENEIHQ

SEQ ID NO: 204 - protein, 65 aa, Homo sapiens
  SITE (9): Xaa equals any of the naturally occurring L-amino acids
  SITE (21): Xaa equals any of the naturally occurring L-amino acids
VVVELINRXQNYFQYIVYLYXKRDGPFYGGTLSMVVFCDVLFLLLLFALFSPITALLSLKRINFI

SEQ ID NO: 205 - protein, 50 aa, Homo sapiens [sequence omitted]

SEQ ID NO: 206 - protein, 90 aa, Homo sapiens
DLTCLLSSNFIIGINVHFFPVPVSEAFICVCMCVLNKCIRYLKNSNLNLNNLKNEIVILCVKVSDVLYSALKTIFIYSSTDTKYILKLLS

SEQ ID NO: 207 - protein, 41 aa, Homo sapiens
MSCLWAGIKFLGFGFCWMDCSLCEPIWVCQIQSLGCHGNLA

SEQ ID NO: 208 - protein, 103 aa, Homo sapiens
SLDTALLSTLCSLAFTAASTSSTVAYVTNPKPLEHLVFGSLITTVCECSLLLRMAHWTLTGHFKAQLSDEELLQLLGLLKRLCLRHDSSGKRDFNDVFSGIHG

SEQ ID NO: 209 - protein, 49 aa, Homo sapiens
MRQTKLEGWLIFPLFSCFSFISLGSDEGPEIFISHLKSLADYSRALVEV

SEQ ID NO: 210 - protein, 49 aa, Homo sapiens; identical to SEQ ID NO: 209

SEQ ID NO: 211 - protein, 489 aa, Homo sapiens
  SITE (79): Xaa equals any of the naturally occurring L-amino acids
  SITE (321): Xaa equals any of the naturally occurring L-amino acids
MPQASEHRLGRTREPPVNIQPRVGSKLPFAPRARSKERRNPASGPNPMLRPLPPRPGLPDERLKKLELGRGRTSGPRPXGPLRADHGVPLPGSPPPTVALPLPSRTNLARSKSVSSGDLRPMGIALGGHRGTGELGAALSRLALRPEPPTLRRSTSLRRLGGFPGPPTLFSIRTEPPASHGSFHMISARSSEPFYSDDKMAHHTLLLGSGHVGLRNLGNTCFLNAVLQCLSSTRPLRDFCLRRDFRQEVPGGGRAQELTEAFADVIGALWHPDSCEAVNPTRFRAVFQKYVPSFSGYSQQDAQEFLKLLMERLHLEINRRXRRAPPILANGPVPSPPRRGGALLEEPELSDDDRANLMWKRYLEREDSKIVDLFVGQLKSCLKCQACGYRSTTFEVFCDLSLPIPKKGFAGGKVSLRDCFNLFTKEEELESENAPVCDRCRQKTRSTKKLTVQRFPRILVLHLNRFSASRGSIKKSSVGVDFSTAATEP

SEQ ID NO: 212 - protein, 463 aa, Homo sapiens
ARGTNLARSKSVSSGDLRPMGIALGGHRGTGELGAALSRLALRPEPPTLRRSTSLRRLGGFPGPPTLFSIRTEPPASHGSFHMISARSSEPFYSDDKMAHHTLLLGSGHVGLRNLGNTCFLNAVLQCLSSTRPLRDFCLRRDFRQEVPGGGRAQELTEAFADVIGALWHPDSCEAVNPTRFRAVFQKYVPSFSGYSQLDAQEFLKLLMERLHLEINRRDRRAPPILANGPVPSPPRRGGALLEEPELSDDDRANLMWKRYLEREDSKIVDLFVGQLKSCLKCQACGYRSTTFEVFCDLSLPIPKKGFAGGKVSLRDCFNLFTKEEELESENAPVCDRCRQKTRSTKKLTVQRFPRILVLHLNRFSASRGSIKKSSVGVDFPLQRLSLGDFASDKAGSPVYQLYALCNHSGSVHYGHYTALCRCQTGWHVYNDSRVSPVSENQVASSEGYVLFYQLMQEPPRCL

SEQ ID NO: 213 - protein, 53 aa, Homo sapiens
KIELMVCTKSLVYVLVFQNNFYINIYIVKKFFLIFGWDIRKYLYYTLSYYNGT

SEQ ID NO: 214 - protein, 9 aa, Homo sapiens
LLSCFYFFL

SEQ ID NO: 215 - protein, 66 aa, Homo sapiens
  SITE (8): Xaa equals any of the naturally occurring L-amino acids
  SITE (11): Xaa equals any of the naturally occurring L-amino acids
  SITE (18): Xaa equals any of the naturally occurring L-amino acids
  SITE (61): Xaa equals any of the naturally occurring L-amino acids
MLLLCYHXFLXFVLGTGXVNIEEAEKLLKPYLNRYPKGAIFLFFAGRIEVIKGNIDAAIRXFEECC

SEQ ID NO: 216 - protein, 66 aa, Homo sapiens; identical to SEQ ID NO: 215
  SITE (8): Xaa equals any of the naturally occurring L-amino acids
  SITE (11): Xaa equals any of the naturally occurring L-amino acids
  SITE (18): Xaa equals any of the naturally occurring L-amino acids
  SITE (61): Xaa equals any of the naturally occurring L-amino acids

SEQ ID NO: 217 - protein, 43 aa, Homo sapiens
MYKITYRVCFLCQPLMVGLGCIGSIAIVLLLLLLVPHVCPKIL

SEQ ID NO: 218 - protein, 43 aa, Homo sapiens; identical to SEQ ID NO: 217

SEQ ID NO: 219 - protein, 79 aa, Homo sapiens
APLAASTILAVASARILAALKSLREFSRSLSPSASALMALTRSDVAWARMRACRTISPASPMELKMFSVTVRMVSVAWS

SEQ ID NO: 220 - protein, 72 aa, Homo sapiens
MGTLMVLTRLAVLLATSLADCTNWRLAVGLVVRAEARRQLLHSAEVCLATMVAAESTWAWVQPGSPKLWQAI

SEQ ID NO: 221 - protein, 72 aa, Homo sapiens; identical to SEQ ID NO: 220

SEQ ID NO: 222 - protein, 43 aa, Homo sapiens
MCRTQFHLFWFIVTELSPVIWAKANQKLSCLSQQTLVLVYFCR

SEQ ID NO: 223 - protein, 84 aa, Homo sapiens
  SITE (36): Xaa equals any of the naturally occurring L-amino acids
  SITE (37): Xaa equals any of the naturally occurring L-amino acids
FSIFKNHISLCWLIIINFKHSFLQSGFSEFFFFKQXXHSFFLVTSKGGTGVGGKECLKMKSLDIEGPRRTGYAKIISNSSTILE

SEQ ID NO: 224 - protein, 43 aa, Homo sapiens; identical to SEQ ID NO: 222

SEQ ID NO: 225 - protein, 27 aa, Homo sapiens
PHCRWPGLYRQLGRRRRSTALLRCHNV

SEQ ID NO: 226 - protein, 37 aa, Homo sapiens
MRKRRPYNRWTGCWLRLAVSCRWAVAISASPWLRLTS

SEQ ID NO: 227 - protein, 37 aa, Homo sapiens; identical to SEQ ID NO: 226

SEQ ID NO: 228 - protein, 153 aa, Homo sapiens
  SITE (98): Xaa equals any of the naturally occurring L-amino acids
MAATQTGTCLMVAALCFVLVLGSLVPCLPEFSSGSQTVKEDPLAADGVYTASQMPSRSLLFYDDGAGLWEDGRSTLLPMEPPDGWEINPGGPAEQRPXDHLQHDHLDSTHETTKYLSEAWPKDGGNGTSPDFSHSKEWFHDRDLGPNTTIKLS

SEQ ID NO: 229 - protein, 153 aa, Homo sapiens
MAATQTGTCLMVAALCFVLVLGSLVPCLPEFSSGSQTVKEDPLAADGVYTASQMPSRSLLFYDDGAGLWEDGRSTLLPMEPPDGWEINPGGPAEQRPRDHLQHDHLDSTHETTKYLSEAWPKDGGNGTSPDFSHSKEWFHDRDLGPNTTIKLS

SEQ ID NO: 230 - protein, 105 aa, Homo sapiens
MCLTTAGFCLLAIHSFALGVQSRQQHSVPIVFEVLPLRVPEPSRVTGCSSFFQTKVLCKQHLLGPRASVNIVLACLACCHRKGLCVHIPANLMSPSSAKLYHSLH

SEQ ID NO: 231 - protein, 37 aa, Homo sapiens
FCLIWSAYLLMCLFLFCLFYFYFSVNARTDLHVKSGL

SEQ ID NO: 232 - protein, 105 aa, Homo sapiens; identical to SEQ ID NO: 230

SEQ ID NO: 233 - protein, 5 aa, Homo sapiens
YSPLC

SEQ ID NO: 234 - protein, 40 aa, Homo sapiens
  SITE (15): Xaa equals any of the naturally occurring L-amino acids
MAYSPLLISLVLAFXPASTYGRASIDFTCFPNHYGISNQY

SEQ ID NO: 235 - protein, 160 aa, Homo sapiens
  SITE (55): Xaa equals any of the naturally occurring L-amino acids
FFDSIGALVPQFLANDDELSSHTYGLLVNKNNHLGHLAVCISQCIWGLLSPCELXGISLGSIILFCPTPCSMQTPSPACWSPSGNPGLAHTLCWRACTLMPLLRLGPYLVTLFALPSETEQLAPSALVVPCEALLLSGFLHRDPCRLPADMQDALLSVDV

SEQ ID NO: 236 - protein, 40 aa, Homo sapiens; identical to SEQ ID NO: 234
  SITE (15): Xaa equals any of the naturally occurring L-amino acids

SEQ ID NO: 237 - protein, 236 aa, Homo sapiens
  SITE (3): Xaa equals any of the naturally occurring L-amino acids
  SITE (29): Xaa equals any of the naturally occurring L-amino acids
  SITE (70): Xaa equals any of the naturally occurring L-amino acids
  SITE (73): Xaa equals any of the naturally occurring L-amino acids
  SITE (80): Xaa equals any of the naturally occurring L-amino acids
  SITE (97): Xaa equals any of the naturally occurring L-amino acids
  SITE (112): Xaa equals any of the naturally occurring L-amino acids
  SITE (117): Xaa equals any of the naturally occurring L-amino acids
  SITE (122): Xaa equals any of the naturally occurring L-amino acids
MEXPAQLLFLLLLWLPDTTGEIVLTQSPXTLSLSPGERATLSCRASQSVSSYLAWYQQKPGQAPRLLIYXASXRATGIPXRFSGSGSGTDFTLTISXLEPEDFAVYYCQQRXNWPPXYTFGXGTKVEIKRTVAAPSVFIFPPSDEQLKSGTASVVCLLNNFYPREAKVQWKVDNALQSGNSQESVTEQDSKDSTYSLSSTLTLSKADYEKHKVYACEVTHQGLSSPVTKSFNRGEC

SEQ ID NO: 238 - protein, 144 aa, Homo sapiens
MRVPAQLLGLLLLWLSGAKCDTQMTQSPSSLSASVGDTVTITCQASDDISKDLNWFQQKPGTAPKLLIFDASNLETGVPSRFSGSGSGTDFTFTISSLQPEDFATYYCQQYDNPPSLSAEGPKWRSNELWLHHLSSSSRHLMSS

SEQ ID NO: 239 - protein, 50 aa, Homo sapiens
  SITE (4): Xaa equals any of the naturally occurring L-amino acids
  SITE (10): Xaa equals any of the naturally occurring L-amino acids
  SITE (22): Xaa equals any of the naturally occurring L-amino acids
  SITE (35): Xaa equals any of the naturally occurring L-amino acids
  SITE (39): Xaa equals any of the naturally occurring L-amino acids
  SITE (42): Xaa equals any of the naturally occurring L-amino acids
VHAXTPFAGXCFDPVSLYWCYXNPGTHCYPTLRGXEQRXPSXRSHIVLRS

SEQ ID NO: 240 - protein, 64 aa, Homo sapiens
MVSPLISALFHVPFLWLGMFFPHSLSGPFPSHLRRASSSRKPLVKPPRARQYPPLASSGYRGRI

SEQ ID NO: 241 - protein, 26 aa, Homo sapiens
MSFPHASTLPFHKLSDLQHTLPNHQG

SEQ ID NO: 242 - protein, 64 aa, Homo sapiens; identical to SEQ ID NO: 240

SEQ ID NO: 243 - protein, 61 aa, Homo sapiens
  SITE (21): Xaa equals any of the naturally occurring L-amino acids
  SITE (27): Xaa equals any of the naturally occurring L-amino acids
  SITE (31): Xaa equals any of the naturally occurring L-amino acids
FNFKFAHRPSNPLVNLTVSPXRNSSLXTRKXPCRESKKFNTHSRPKSSHQLRKRSSSTPTT

SEQ ID NO: 244 - protein, 56 aa, Homo sapiens
MLIFLKCLTVSYAKYSSKIYTAVSNTFSTASDSWLCVKTPRGYHWFMSLETPDIEQ

SEQ ID NO: 245 - protein, 10 aa, Homo sapiens
VLLFLSLLTS

SEQ ID NO: 246 - protein, 56 aa, Homo sapiens; identical to SEQ ID NO: 244

SEQ ID NO: 247 - protein, 75 aa, Homo sapiens; identical to SEQ ID NO: 120

SEQ ID NO: 248 - protein, 55 aa, Homo sapiens
MIYFALLLASLFFLLKVKSHFGCKNVTTTSARIFLKPLCTPKSIFPLSRYGRMSS

SEQ ID NO: 249 - protein, 55 aa, Homo sapiens; identical to SEQ ID NO: 248

SEQ ID NO: 250 - protein, 85 aa, Homo sapiens
MLHNAFLFVLFALVSGYGNYAATAHDWLYENGQLSRKEADAVLYRALRAEGVARWRAWLMYAGVRLGGAKQYKTPTSSGFSSSGD

SEQ ID NO: 251 - protein, 85 aa, Homo sapiens; identical to SEQ ID NO: 250

SEQ ID NO: 252 - protein, 59 aa, Homo sapiens
MIIANIFMNPLLCAGYLFCFAYTLIHLILLTTSEVCSITAPFFTAVLQSSACPSTHWPE

SEQ ID NO: 253 - protein, 59 aa, Homo sapiens; identical to SEQ ID NO: 252

SEQ ID NO: 254 - protein, 67 aa, Homo sapiens
MLFLIYVSLLMLLFSLCLSLPHLQPPSLREILIPVHSLRFSLVSPLHGSLASSLLLQHCGTLRQVFF

SEQ ID NO: 255 - protein, 67 aa, Homo sapiens; identical to SEQ ID NO: 254

SEQ ID NO: 256 - protein, 86 aa, Homo sapiens
SLKHFWSQGFWIKDTQCATCRMVVARWEERMESYCLMIQCFRLGRWKVLEMCDGYGCATMGRYLVLLNCAHLKMVKMINFVYVLKQ

SEQ ID NO: 257 - protein, 52 aa, Homo sapiens
  SITE (36): Xaa equals any of the naturally occurring L-amino acids
  SITE (37): Xaa equals any of the naturally occurring L-amino acids
MQRLGKAPGTWQAISKCWLLLLLSLPFSQSIIISLXXGTMSYLPLYFPQYFP

SEQ ID NO: 258 - protein, 52 aa, Homo sapiens
MQRLGKAPGTWQAISKCWLLLLLSLPFSQSIIISLRAGTMSYLPLYFPQYFP

SEQ ID NO: 259 - protein, 20 aa, Homo sapiens
MLCVLLAVAFQSSPIPGAAA

SEQ ID NO: 260 - protein, 69 aa, Homo sapiens
MALFRPILLPAPGAWWWPCHHALCPSGCGFPEQPHSRCSSLELQSASRQCWLQWLGDIRPLLLQGREVT

SEQ ID NO: 261 - protein, 51 aa, Homo sapiens
  SITE (34): Xaa equals any of the naturally occurring L-amino acids
MGLIAADVNLDLLVQVVPASCLHCGVTIFPFPHXIHQKPVTKRGQTPGQGN

SEQ ID NO: 262 - protein, 51 aa, Homo sapiens
MGLIAADVNLDLLVQVVPASCLHCGVTIFPFPHFIHQKPVTKRGQTPGQGN

SEQ ID NO: 263 - protein, 13 aa, Homo sapiens
SCISWVFVMINGL

SEQ ID NO: 264 - protein, 61 aa, Homo sapiens
MNASLISWVLVLHRICLGLSDIPKENCIITISGMQLSHHGQSLGKWAEKLHVFYSLFSFLL

SEQ ID NO: 265 - protein, 322 aa, Homo sapiens
  SITE (28): Xaa equals any of the naturally occurring L-amino acids
RAPRRTGPASFSSRPAGTCSDNRVTSFXDLIHDQDEDEEEEEGQRFYAGGSERSGQQIVGPPRKKSPNELVDDLFKGAKEHGAVAVERVTKSPGETSKPRPFAGGGYRLGAAPEEESAYVAGEKRQHSSQDVHVVLKLWKSGFSLDNGELRSYQDPSNAQFLESIRRGEVPAELRRLAHGGQVNLDMEDHRDEDFVKPKGAFKAFTGEGQKLGSTAPQVLSTSSPAQQAENEAKASSSILIDESEPTTNIQIRLADGGRLVQKFNHSHRISDIRLFIVDARPAMAATSFILMTTFPNKELADESQTLKEANLLNAVIVQRLT

SEQ ID NO: 266 - protein, 61 aa, Homo sapiens; identical to SEQ ID NO: 264

SEQ ID NO: 267 - protein, 4 aa, Homo sapiens
PNSP

SEQ ID NO: 268 - protein, 64 aa, Homo sapiens [sequence omitted]

SEQ ID NO: 269 - protein, 64 aa, Homo sapiens [sequence omitted]

SEQ ID NO: 270 - protein, 58 aa, Homo sapiens
MVSLCSGLPSSCLLLGSTAAIIQRQVCLFQGARQWNPVSEFLRAHHHCGNRAGLPAVL

SEQ ID NO: 271 - protein, 58 aa, Homo sapiens; identical to SEQ ID NO: 270

SEQ ID NO: 272 - protein, 122 aa, Homo sapiens
  SITE (19): Xaa equals any of the naturally occurring L-amino acids
  SITE (73): Xaa equals any of the naturally occurring L-amino acids
KAPSSHPGLTCVSLSRLQXSLSLCFPSGPCWAGLLSSLALAGGAPGALPPWQPGQDSKMRTAELVGGSHGPAXGPGEAEPEPTAVVLWTVDPEGGLGQVPAEGPGGLCVPLGPGALVTWTPG

SEQ ID NO: 273 - protein, 130 aa, Homo sapiens
STCCGWGPLGHSRVRGCHCHLGHVGRHQHFVVTNSTVTNIFGQIPFYTSRQLLVCNPTGQREGPVTWLSHCPAPQMVLGLLFSLGPANTTVFTSAHWLSAVVPGSQWHVSPRSSLIPQHTPKGSVANTLN

SEQ ID NO: 274 - protein, 44 aa, Homo sapiens
MRLRNGTVATALAFITSFLTLSWYTTWQNGKGKENDSENVHEMY

SEQ ID NO: 275 - protein, 216 aa, Homo sapiens
  SITE (6): Xaa equals any of the naturally occurring L-amino acids
  SITE (18): Xaa equals any of the naturally occurring L-amino acids
CFPWGXALRQKLFPSALXALVPSGAQPLPATKDTVLAPLRMSQVRSLVIGLQNLLVQKDPLLSQACVGCLEALLDYLDARSPDIALHVASQPWNRFLLFTLLDAGENSFLRPEILRLMTLFMRYRSSSVLSHEEVGDVLQGVALADLSTLSNTTLQALHGFFQQLQSMGHLADHSMAQTLQASLEGLPPSTSSGQPPLQDMLCLGGVAVSLSHIRN

SEQ ID NO: 276 - protein, 122 aa, Homo sapiens
  SITE (92): Xaa equals any of the naturally occurring L-amino acids
  SITE (100): Xaa equals any of the naturally occurring L-amino acids
  SITE (109): Xaa equals any of the naturally occurring L-amino acids
  SITE (116): Xaa equals any of the naturally occurring L-amino acids
MLALTLAKADSPRTALLCSAWLLTASFSAQQHKGSLQVHQTLSVEMDQVLKALSFPKKKAALLSTAILCFLRTALRQSFSSAWNPGALKGPXTAATKDTXLTSLRMSKXGPGHWAXKTSWCK

SEQ ID NO: 277 - protein, 282 aa, Homo sapiens
MLALTLAKADSPRTALLCSAWLLTASFSAQQHKGSLQVHQTLSVEMDQVLKALSFPKKKAALLSAAILCFLRTALRQSFSSALVALVPSGAQPLPATKDTVLAPLRMSQVRSLVIGLQNLLVQKDPLLSQACVGCLEALLDYLDARSPDIALHVASQPWNRFLLFTLLDAGENSFLRPEILRLMTLFMRYRSSSVLSHEEVGDVLQGVALADLSTLSNTTLQALHGFFQQLQSMGHLADHSMAQTLQASLEGLPPSTSSGQPPLQDMLCLGGVAVSLSHIRN

SEQ ID NO: 278 - protein, 39 aa, Homo sapiens
MAFGQEVTHLTKTSWLAPLRFIKGLLGPWGWILLILDLE

SEQ ID NO: 279 - protein, 39 aa, Homo sapiens; identical to SEQ ID NO: 278

SEQ ID NO: 280 - protein, 107 aa, Homo sapiens
GLDVQPVAQGSKLTQEVREGCLAVAGANGFRGGYDGYRPSFSNTPNSGYTQSQFSAPRDYSGYQRDGYQQNFKRGSGQSGPRGAPRGRGGPPRPNRGMPQMNTQQVN

SEQ ID NO: 281 - protein, 77 aa, Homo sapiens
MGTHPKYLEMMELDIGDATQVYVAFLVYLDLMESKSWHEVNCVGLPELQLICLVGTEIEGEGLQTVVPNPHHCFPQP

SEQ ID NO: 282 - protein, 49 aa, Homo sapiens
MGGTCVLLLSSHTQSCLFVSCCHCQLIVETAISFSYSALPSAFWPLQLP

SEQ ID NO: 283 - protein, 50 aa, Homo sapiens
  SITE (43): Xaa equals any of the naturally occurring L-amino acids
  SITE (50): Xaa equals any of the naturally occurring L-amino acids
MNFLVFLSLSSSLVSAAGPRFPSREERGVGGVVLIKSEDMTLXERSKGSX

SEQ ID NO: 284 - protein, 240 aa, Homo sapiens
  SITE (67): Xaa equals any of the naturally occurring L-amino acids
GEGDDKEESVEKLDCHYSGHHPQPASFCTFGSRQIGRGYYVFDSRWNRLRCALNLMVEKHLNAQLWXKIPPVPSTTSPISTRIPHRTNSVPTSQCGVSYLAAATVSTSPVLLSSTCISPNSKSVPAHGTTLNAQPAASGAMDPVCSMQSRQVSSSSSSPSTPSGLSSVPSSPMSRKPQKLKSSKSLRPKESSGNSTNCQNASSSTSGGSGKKRKNSSPLLVHSSSSSSSSSSSSHSMGVF

SEQ ID NO: 285 - protein, 43 aa, Homo sapiens
  SITE (7): Xaa equals any of the naturally occurring L-amino acids
YSMVYMXHIFLIQSIIDGHLGWFQVFAIVNSATVNIRVHVSLW

SEQ ID NO: 286 - protein, 56 aa, Homo sapiens
  SITE (3): Xaa equals any of the naturally occurring L-amino acids
  SITE (4): Xaa equals any of the naturally occurring L-amino acids
  SITE (14): Xaa equals any of the naturally occurring L-amino acids
  SITE (21): Xaa equals any of the naturally occurring L-amino acids
FAXXDGFQLHPCPXKGHELIXFYGCIVFHGVYVPHFLNLVCHCWTFGLVPSLCYCE

SEQ ID NO: 287 - protein, 75 aa, Homo sapiens
MSWLFPATILFEEKICFSLFPRKLVGQHGHYSSCAVTPAPRCLELSVLTFMHDCKASWSIFYGASVCFRPMTFVR

SEQ ID NO: 288 - protein, 75 aa, Homo sapiens; identical to SEQ ID NO: 287

SEQ ID NO: 289 - protein, 83 aa, Homo sapiens [sequence omitted]

SEQ ID NO: 290 - protein, 223 aa, Homo sapiens
  SITE (132): Xaa equals any of the naturally occurring L-amino acids
AWYLLRVQVLQLVAAYLSLPSNNLSHSLWEQLCAQGWQTPEIALIDSHKLLRSIILLLMGSDILSTQKAAVETSFLDYGENLVQKWQVLSEVLSCSEKLVCHLGRLGSVSEAKAFCLEALKLTTKLQIPRQXALFLVLKGELELARNDIDLCQSDLQQVLFLLESCTEFGGVTQHLDSVKKVHLQKGKQQAQVPCPPQLPEEELFLRGPALELVPLWPRSLAP

SEQ ID NO: 291 - protein, 8 aa, Homo sapiens
AWFLVKPE

SEQ ID NO: 292 - protein, 223 aa, Homo sapiens
AWYLLRVQVLQLVAAYLSLPSNNLSHSLWEQLCAQGWQTPEIALIDSHKLLRSIILLLMGSDILSTQKAAVETSFLDYGENLVQKWQVLSEVLSCSEKLVCHLGRLGSVSEAKAFCLEALKLTTKLQIPRQCALFLVLKGELELARNDIDLCQSDLQQVLFLLESCTEFGGVTQHLDSVKKVHLQKGKQQAQVPCPPQLPEEELFLRGPALELVPLWPRSLAP

SEQ ID NO: 293 - protein, 88 aa, Homo sapiens
  SITE (7): Xaa equals any of the naturally occurring L-amino acids
  SITE (30): Xaa equals any of the naturally occurring L-amino acids
  SITE (43): Xaa equals any of the naturally occurring L-amino acids
  SITE (46): Xaa equals any of the naturally occurring L-amino acids
ADPSPSXWLQTHRGPRLLWPHHQQLLLSFXEPRKPLILLLPVXAPXSLKPHSCIPFSLDITPPTPWLNFLPVVAWSFGHCPGLFLSPS

SEQ ID NO: 294 - protein, 80 aa, Homo sapiens
  SITE (61): Xaa equals any of the naturally occurring L-amino acids
  SITE (69): Xaa equals any of the naturally occurring L-amino acids
  SITE (75): Xaa equals any of the naturally occurring L-amino acids
MHHHTRLVFVFLVEMGFHHVGQAGLELLTSSDLPALASQSAGITGVSHCAQLPFLPLKSKXGWELSPWXFMVAKXLNPVA

SEQ ID NO: 295 - protein, 18 aa, Homo sapiens
  SITE (4): Xaa equals any of the naturally occurring L-amino acids
  SITE (14): Xaa equals any of the naturally occurring L-amino acids
MVAXLLILLLDSGXLLAG

SEQ ID NO: 296 - protein, 126 aa, Homo sapiens
ATTSVPKYVFNLNFILMCLRDESKYMLVTSHSNVEVGRWLPGLPSPGRICGEQSDVHPSGLFSINDSLLDLLLLGFRSKRGIVVENALLGEGEPEIHKRRLPCSFAYLAAPRLGVRIPGFPSLLCH

SEQ ID NO: 297 - protein, 26 aa, Homo sapiens
MPVVLFQLWLFILKTDNAFAWLKIRR

SEQ ID NO: 298 - protein, 136 aa, Homo sapiens
  SITE (3): Xaa equals any of the naturally occurring L-amino acids
  SITE (67): Xaa equals any of the naturally occurring L-amino acids
PSXMLLLWASSLPTRCDCSFPVTPLVPLVHVICVWVMFPSAATAACHPGAGAFFSQGPSPFSRTWPXLGHREIPAEGAGETVALGLQPKRHTLAVGVHGMLALSTVTVGGFGGFPWTSGPGCPPLSWTCFIFPILT

SEQ ID NO: 299 - protein, 19 aa, Homo sapiens
QIWPFLPPSQPSGPLQRAV

SEQ ID NO: 300 - protein, 133 aa, Homo sapiens
MLLLWASSLPTRCDCSFPVTPLVPLVHVICVWVMFPSAATAACHPGAGAFFSQGPSPFSRTWPLLGHREIPAEGAGETVALGLQPKRHTLAVGVHGMLALSTVTVGGFGGFPWTSGPGCPPLSWTCFIFPILT

SEQ ID NO: 301 - protein, 11 aa, Homo sapiens
SSLKNQVSVSQ

SEQ ID NO: 302 - protein, 495 aa, Homo sapiens
MKHLWFFLLLVAAPRWVLSQVELQESGPGLVKPSQTLSLTCSVSGVSMSRGDWSWSWVRQVPGKGLEWIGHIDYTGKTDYKSSLKNQVSISQDTAKNQFFLRVESVTAADTAVYFCARLFESSGYGAWLDPWGPGILVTVSSASPTSPKVFPLSLCSTQPDGNVVIACLVQGFFPQEPLSVTWSESGQGVTARNFPPSQDASGDLYTTSSQLTLPATQCLAGKSVTCHVKHYTNPSQDVTVPCPVPSTPPTPSPSTPPTPSPSCCHPRLSLHRPALEDLLLGSEANLTCTLTGLRDASGVTFTWTPSSGKSAVQGPPDRDLCGCYSVSSVLPGCAEPWNHGKTFTCTAAYPESKTPLTATLSKSGNTFRPEVHLLPPPSEELALNELVTLTCLARGFSPKDVLVRWLQGSQELPREKYLTWASRQEPSQGTTTFAVTSILRVAAEDWKKGDTFSCMVGHEALPLAFTQKTIDRLAGKPTHVNVSVVMAEVDGTCY

SEQ ID NO: 303 - protein, 90 aa, Homo sapiens
  SITE (8): Xaa equals any of the naturally occurring L-amino acids
PYECKECXKAFRVHVHLTQHRKIHTDVKPYECKECGKTFSRASYLVQHSRIHTGKKPYECKECGKAFSSGSYLVQHQRIHTGERPYWLTY

SEQ ID NO: 304 - protein, 93 aa, Homo sapiens
  SITE (5): Xaa equals any of the naturally occurring L-amino acids
QRIHXGEKPYECNKCGKAFTVYGQLIGHQSVHTGEKPFECKECGKAFRLNSFLTEHQRVHTGEKPFKCKKCGKTFRYSSALKVHLRKHMSVIP

SEQ ID NO: 305 - protein, 9 aa, Homo sapiens
MWVCSITDQ

SEQ ID NO: 306 - protein, 264 aa, Homo sapiens
  SITE (5): Xaa equals any of the naturally occurring L-amino acids
  SITE (7): Xaa equals any of the naturally occurring L-amino acids
  SITE (13): Xaa equals any of the naturally occurring L-amino acids
  SITE (63): Xaa equals any of the naturally occurring L-amino acids
  SITE (88): Xaa equals any of the naturally occurring L-amino acids
  SITE (170): Xaa equals any of the naturally occurring L-amino acids
  SITE (171): Xaa equals any of the naturally occurring L-amino acids
TWGKXKXPFIESXPGGKIGWGKKGLFFLKVNYWGKKAFNPRGHSKKVTFHQLGLKKNPFWGLXKEVLGKAFSTFSYLVQHQRIHTSEXPYECKECGKAFSTSSPLAKHQRIHTGEKPYECKECGKSFTVYGQLTRHQSIHTGEKPFECKECGKAFRLSSFLHAHQRIHAXXKPYGCKECGKTFSRASYLVQHGRLHTGEKPCECKECGKAFSTGSYLVQHQRIHTGEKPYECKECGKAFISRHQLTVHQRVHTGEKPYKCKEEG

SEQ ID NO: 307 - protein, 9 aa, Homo sapiens
MWVCSITDQ

SEQ ID NO: 308 - protein, 10 aa, Homo sapiens
LTYLAHLLCF

SEQ ID NO: 309 - protein, 10 aa, Homo sapiens
MCSLSSEHLA

SEQ ID NO: 310 - protein, 465 aa, Homo sapiens
  SITE (16): Xaa equals any of the naturally occurring L-amino acids
  SITE (27): Xaa equals any of the naturally occurring L-amino acids
  SITE (44): Xaa equals any of the naturally occurring L-amino acids
NRRNGASQITWCSGQXKSSKWAREIGXYQTGVYQPGWGPQRHAXGEIATRAISMLAILTGNVGINGGNSGAREGSYSLPFVRMPTLENPIQTSISMFMWTDAIERGPEMTALRDGVRGKDKLDVPIKMIWNYAGNCLINQHSEINRTHEILQDDKKCELIVVIDCHMTSSAKYADILLPDCTASEQMDFALDASCGNMSYVIFNDQVIKPRFECKTIYEMTSELAKRLGVEQQFTEGRTQEEWMRHLYAQSREAIPELPTFEEFRKQGIFKKRDPQGHHVAYKAFREDPQANPLTTPSGKIEIYSQALADIAATWELPEGDVIDPLPIYTPGFESYQDPLNKQYPLQLTGFHYKSRVHSTYGNVDVLKAACRQEMWINPLDAQKRGIHNGDKVRIFNDRGEVHIEAKVTPRMMPGVVALGEGAWYDPDAKRVDKGGCINVLTTQRPSPLAKGNPSHTNLVQVEKV

SEQ ID NO: 311 - protein, 185 aa, Homo sapiens
MAQANSTLGAGGWVGNGVYVSGVQREYDAFITNQLRAAQTQSSGLTARYEQMSKIDNMLSTSTSSLATQMQDFFTSLQTLVSNAEDPAARQALIGKSEGLVNQFKTTDQYLRDQDKQVNIAIGASVDQINNYAKQIASLNDQISRLTGVGAGASPNNLLDQRDQLGERIKPDCWCRSQRSGWRHL

SEQ ID NO: 312 - protein, 56 aa, Homo sapiens
MSHCAWPPLLIFITRVQWATATKCQFTAKSGIGLTQGCSSVFVKLGLFLICPYDWE

SEQ ID NO: 313 - protein, 56 aa, Homo sapiens; identical to SEQ ID NO: 312

SEQ ID NO: 314 - protein, 42 aa, Homo sapiens
LPARLLQRSPRRCRRRRVPSPSLAHVGRRVQPCYSRAPPLSS

SEQ ID NO: 315 - protein, 146 aa, Homo sapiens
  SITE (7): Xaa equals any of the naturally occurring L-amino acids
MAALLLXPLLLLLPLLLLKLHLWPQLRWLPAATAARGALEKASGQRREPEMQRPEAARSLPEGTVPPEVEEPPPLCHLEQLWRCSSPLAQSFCGSGSGWPRPACALPLCPPPCAGAPCCTASAAAARARWCWRQSFWSPWSRTCPP

SEQ ID NO: 316 - protein, 174 aa, Homo sapiens
  SITE (151): Xaa equals any of the naturally occurring L-amino acids
  SITE (161): Xaa equals any of the naturally occurring L-amino acids
  SITE (164): Xaa equals any of the naturally occurring L-amino acids
MAALLLLPLLLLLPLLLLKLHLWPQLRWLPADLAFAVRALCCKRALRARALAAAAADPEGPEGGCSLAWRLAELAQQRAAHTFLIHGSRRFSYSEAERESNRAARAFLRALGWDWGPDGGDSGEGSAGEGERAAPGAGDASGRKRRGVCRXGTVPPEGGRXPPXPFVTLEANCG

SEQ ID NO: 317 - protein, 119 aa, Homo sapiens
  SITE (14): Xaa equals any of the naturally occurring L-amino acids
  SITE (78): Xaa equals any of the naturally occurring L-amino acids
QWGGGQLMELVPLXCAFPGVGSWGWEQGKAASSLGFLLCLPRVAANPVPAGGAGMASCPGLWQETLFPLPVGLPRLSXPFSHKKIWGQARWLTPVIPALWEAEAGSHKVRRSGPSWLIR

SEQ ID NO: 318 - protein, 234 aa, Homo sapiens
MAALLLLPLLLLLPLLLLKLHLWPQLRWLPADLAFAVRALCCKRALRARALAAAAADPEGPEGGCSLAWRLAELAQQRAAHTFLIHGSRRFSYSEAERESNRAARAFLRALGWDWGPDGGDSGEGSAGEGERAAPGAGDAAAGSGAEFAGGDGAARGGGAAALCHLEQLWRCSSPLAQSFCGSGSGWPRPACALPLCPPPCAGAPCCTASAAAARARWCWRQSFWSPWSRTCPP

SEQ ID NO: 319 - protein, 683 aa, Homo sapiens
MAALLLLPLLLLLPLLLLKLHLWPQLRWLPADLAFAVRALCCKRALRARALAAAAADPEGPEGGCSLAWRLAELAQQRAAHTFLIHGSRRFSYSEAERESNRAARAFLRALGWDWGPDGGDSGEGSAGEGERAAPGAGDAAAGSGAEFAGGDGAARGGGAAAPLSPGATVALLLPAGPEFLWLWFGLAKAGLRTAFVPTALRRGPLLHCLRSCGARALVLAPEFLESLEPDLPALRAMGLHLWAAGPGTHPAGISDLLAEVSAEVDGPVPGYLSSPQSITDTCLYIFTSGTTGLPKAARISHLKILQCQGFYQLCGVHQEDVIYLALPLYHMSGSLLGIVGCMGIGATVVLKSKFSAGQFWEDCQQHRVTVFQYIGELCRYLVNQPPSKAERGHKVRLAVGSGLRPDTWERFVRRFGPLQVLETYGLTEGNVATINYTGQRGAVGRASWLYKHIFPFSLIRYDVTTGEPIRDPQGHCMATSPGEPGLLVAPVSQQSPFLGYAGGPELAQGKLLKDVFRPGDVFFNTGDLLVCDDQGFLRFHDRTGDTFRWKGENVATTEVAEVFEALDFLQEVNVYGVTVPGHEGRAGMAALVLRPPHALDLMQLYTHVSENLPPYARPRFLRLQESLATTETFKQQKVRMANEGFDPSTLSDPLYVLDQAVGAYLPLTTARYSALLAGNLRI

SEQ ID NO: 320 - protein, 162 aa, Homo sapiens
  SITE (157): Xaa equals any of the naturally occurring L-amino acids
MGPRFTMLLAMWLVCGSEPHPHATIRGSHGGRKVPLVSPDSSRPARFLRHTGRSRGIERSTLEEPNLQPLQRRRSVPVLRLARPTEPPARSDINGAAVRPEQRPAARGSPREMIRDEGSSARSRMLRFPSGSSSPNILASFAGKNRVWVISSPHASXGYYRL

SEQ ID NO: 321 - protein, 509 aa, Homo sapiens
MTWRMGPRFTMLLAMWLVCGSEPHPHATIRGSHGGRKVPLVSPDSSRPARFLRHTGRSRGIERSTLEEPNLQPLQRRRSVPVLRLARPTEPPARSDINGAAVRPEQRPAARGSPREMIRDEGSSARSRMLRFPSGSSSPNILASFAGKNRVWVISAPHASEGYYRLMMSLLKDDVYCELAERHIQQIVLFHQAGEEGGKVRRITSEGQILEQPLDPSLIPKLMSFLKLEKGKFGMVLLKKTLQVEERYPYPVRLEAMYEVIDQGPIRRIEKIRQKGFVQKCKASGVEGQVVAEGNDGGGGAGRPSLGSEKKKEDPRRAQVPPTRESRVKVLRKLAATAPAFPQPPSTPRATTLPPAPATTVTRSTSRAVTVAARPMTTTAFPTTQRPWTPSPSHRPPTTTEVITARRPSVSENLYPPSRKDQHRERPQTTRRPSKATSLESFTNAPPTTISEPSTRAAGPGRFRDNRMDRREHGHRDPNVVPGPPKPAKEKPPKKKAQDKILSNEYEEV

SEQ ID NO: 322 - protein, 68 aa, Homo sapiens
  SITE (5): Xaa equals any of the naturally occurring L-amino acids
PPHLXSFEFLKNVQLRPDTVAHTCDPGTLGGRGWWITGSGDRDILANTVKRRLYRKCRRLAGHGGGRL

SEQ ID NO: 323 - protein, 58 aa, Homo sapiens
MPNQFWKLHILLFLLFFLFPLVQLCIFILISNKEKKNVCTLRKTYIVRHFLWLRSFQV

SEQ ID NO: 324 - protein, 58 aa, Homo sapiens
MQVFSALLYSLMHFYLPSFTLEMYLNTLLSHDLLSFFHCSGLVFFVYFKSVTGLFSGV

SEQ ID NO: 325 - protein, 1 aa, Homo sapiens
I

SEQ ID NO: 326 - protein, 7 aa, Homo sapiens
IFTCVLY

SEQ ID NO: 327 - protein, 41 aa, Homo sapiens
  SITE (16): Xaa equals any of the naturally occurring L-amino acids
QTVSAFLPPLFYVTFXLGKINYTKYHIIPSYKLLPENKSCV

SEQ ID NO: 328 - protein, 58 aa, Homo sapiens; identical to SEQ ID NO: 324

SEQ ID NO: 329 - protein, 14 aa, Homo sapiens
  SITE (7): Xaa equals any of the naturally occurring L-amino acids
MMPAYPXLLAWILF

SEQ ID NO: 330 - protein, 32 aa, Homo sapiens
AWSHLSILLNYKLQRQEWHLFTYFEFVCNCLD

SEQ ID NO: 331 - protein, 188 aa, Homo sapiens [sequence omitted]

SEQ ID NO: 332 - protein, 188 aa, Homo sapiens [sequence omitted]

SEQ ID NO: 333 - protein, 44 aa, Homo sapiens [sequence omitted]

SEQ ID NO: 334 - protein, 44 aa, Homo sapiens [sequence omitted]

SEQ ID NO: 335 - protein, 249 aa, Homo sapiens
  SITE (147): Xaa equals any of the naturally occurring L-amino acids
  SITE (150): Xaa equals any of the naturally occurring L-amino acids
  SITE (196): Xaa equals any of the naturally occurring L-amino acids
  SITE (222): Xaa equals any of the naturally occurring L-amino acids
MVCVFMCIVGVCVACCACVYCGCLLSRAVERTSGKQPQHQGQARSAECMEAGQVGAWDEGSTEMQGCQGPWNQEPMIKATVHTALEAKDIFISQGLKSMGQGWAPGQDWGYRVDQSPSLPPGAYPHPFTSQVSPPQPLGELLLIPQXVAXVTLLPEASPHPLKHPLPAAHLQHSQRAPWPVSTGLSLLGGAGAEQXPGLGVPAPRSTPSPTASLFNLRQAVXLLSLTFPLCKMREGTAPSKPSFSLKPL

SEQ ID NO: 336 - protein, 42 aa, Homo sapiens
MKIVTTLYCLFVFLLNCFGVGGSCIFLSNRTPGFSWAHDCPQ

SEQ ID NO: 337 - protein, 42 aa, Homo sapiens; identical to SEQ ID NO: 336

SEQ ID NO: 338 - protein, 42 aa, Homo sapiens; identical to SEQ ID NO: 336

SEQ ID NO: 339 - protein, 82 aa, Homo sapiens [sequence omitted]

SEQ ID NO: 340 - protein, 265 aa, Homo sapiens
  SITE (112): Xaa equals any of the naturally occurring L-amino acids
  SITE (113): Xaa equals any of the naturally occurring L-amino acids
  SITE (193): Xaa equals any of the naturally occurring L-amino acids
  SITE (222): Xaa equals any of the naturally occurring L-amino acids
  SITE (238): Xaa equals any of the naturally occurring L-amino acids
  SITE (258): Xaa equals any of the naturally occurring L-amino acids
MDLLQFLAFLFVLLLSGMGATGTLRTSLDPSLEIYKKMFEVKRREQLLALKNLAQLNDIHQQYKILDVMLKGLFKVLEDSRTVLTAADVLPDGPFPQDEKLKDAFSHVVENXXFFGDVVLRFPKIVHYYFDHNSNWNLLIRWGISFCNQTGVFNQGPHSPILSLMAQELGISEKDSNFQNPFKIDRTEFIPSXDPFQKALREEEKRRKKEEKRKEIRKGPKXLPDSHLELLGPWSSFXVQGATRRQVREGRRGWSFGXWLEEAPF

SEQ ID NO: 341 - protein, 229 aa, Homo sapiens
MDLLQFLAFLFVLLLSGMGATGTLRTSLDPSLEIYKKMFEVKRREQLLALKNLAQLNDIHQQYKILDVMLKGLFKVLEDSRTVLTAADVLPDGPCPQDEKLKDAFSHVVENTAFFGDVVLRFPRIVHYYFDHNSNWNLLIRWGISFCNQTGVFNQGPHSPILSLMAQELGISEKDSNFQNPFKIDRTEFIPSTDPFQKALREEEKRRKKEEKRKEIRKGPRISRSQSEL

SEQ ID NO: 342 - protein, 88 aa, Homo sapiens
  SITE (1): Xaa equals any of the naturally occurring L-amino acids
  SITE (2): Xaa equals any of the naturally occurring L-amino acids
  SITE (19): Xaa equals any of the naturally occurring L-amino acids
XXEDRLPGPILPRGFQLWXSLGGEFPRLQIRPMCHAPNCLSVRPSVRPSVHPSIHPSIPVTISTPMCQMPYISNLMQVPPPPCPLLIQ

SEQ ID NO: 343 - protein, 162 aa, Homo sapiens
  SITE (138): Xaa equals any of the naturally occurring L-amino acids
  SITE (152): Xaa equals any of the naturally occurring L-amino acids
MRPRGLPPLLVVLLGCWASVSAQTDATPAVTTEGLNSTEAALATFGTFPSTRPPGTPRAPGPSSGPRPTPVTDVAVLCVCDLSPAQCDINCCCDPDCSSVDFSVFSACSVPVVTGDSQFCSQKAVIYSLNFTANPPQXVFELVDQINPSIFXIHITNCRCSV

SEQ ID NO: 344 - protein, 274 aa, Homo sapiens
  SITE (56): Xaa equals any of the naturally occurring L-amino acids
PFYSSPEILRVPDSRKKVPITVQSIVIQSLNKTLTRREDTDVLQPTLVNAGHFSLXVNVVLEVKYSLTYTDAGEVTKADLSFVLGTVSSVVVPLQQKFEIHFLQENTQPVPLSGNPGYVVGLPLAAGFQPHKGGALPCQLVAQKVKSLLWGQGFPDYVAPFGNSQAQDMLDWVPIHFITQSFNRKDSCQLPGALVIEVKWTKYGSLLNPQAKIVNVTANLISSSFPEANSGNERTILISTAVTFVDVSAPAEAGFRAPPAINARLPFNFFFPFV

SEQ ID NO: 345 - protein, 254 aa, Homo sapiens
  SITE (5): Xaa equals any of the naturally occurring L-amino acids
  SITE (15): Xaa equals any of the naturally occurring L-amino acids
  SITE (17): Xaa equals any of the naturally occurring L-amino acids
  SITE (24): Xaa equals any of the naturally occurring L-amino acids
THLFXCNSYYKPLTXHXPFIIQKXPDENNFDTLMKTSDGFTLNAESYVSFTTKLDIPTAAKYEYGVPLQTSDSFLRFPSSLTSSLCTDNNPAAFLVNQAVKCTRKINLEQCEEIEALSMAFYSSPEILRVPDSRKKVPITVQSIVIQSLNKTLTRREDTDVLQPTLVNAGHFSLCVNVVLEDSCQLPGALVIEVKWTKYGSLLNPQAKIVNVTANLISSSFPENAQMHQFLNIHVKFENCTFGEIKFYIQLAKK

SEQ ID NO: 346 - protein, 587 aa, Homo sapiens
MRPRGLPPLLVVLLGCWASVSAQTDATPAVTTEGLNSTEAALATFGTFPSTRPPGTPRAPGPSSGPRPTPVTDVAVLCVCDLSPAQCDINCCCDPDCSSVDFSVFSACSVPVVTGDSQFCSQKAVIYSLNFTANPPQRVFELVDQINPSIFCIHITNYKPALSFINPEVPDENNFDTLMKTSDGFTLNAESYVSFTTKLDIPTAAKYEYGVPLQTSDSFLRFPSSLTSSLCTDNNPAAFLVNQAVKCTRKINLEQCEEIEALSMAFYSSPEILRVPDSRKKVPITVQSIVIQSLNKTLTRREDTDVLQPTLVNAGHFSLCVNVVLEVKYSLTYTDAGEVTKADLSFVLGTVSSVVVPLQQKFEIHFLQENTQPVPLSGNPGYVVGLPLAAGFQPHKGSGIIQTTNRYGQLTILHSTTEQDCLALEGVRTPVLFGYTMQSGCKLRLTGALPCQLVAQKVKSLLWGQGFPDYVAPFGNSQAQDMLDWVPIHFITQSFNRKDSCQLPGALVIEVKWTKYGSLLNPQAKIVNVTANLISSSFPEANSGNERTILISTAVTFVDVSAPAEAGFRAPPAINARLPFNFFFPFV

SEQ ID NO: 347 - protein, 184 aa, Homo sapiens
MKALGAVLLALLLCGRPGRGQTQQEEEEEDEDHGPDDYDEEDEDEVEEEETNRLPGGRSRVLLRCYTCKSLPRDERCNLTQNCSHGQTCTTLIAHGNTESGLLTTHSTWCTDSCQPITKTVEGTQVTMTCCQSSLCNVPPWQSSRVQDPTGKGAGGPRGSSETVGAALLLNLLAGLGAMGARRP

SEQ ID NO: 348 - protein, 108 aa, Homo sapiens
  SITE (19): Xaa equals any of the naturally occurring L-amino acids
  SITE (21): Xaa equals any of the naturally occurring L-amino acids
  SITE (29): Xaa equals any of the naturally occurring L-amino acids
  SITE (87): Xaa equals any of the naturally occurring L-amino acids
MFSLSWQLSLVTFMGFPIXMXVSNIYGKXYKRLSKEVQNALARASNTAEETISAMKTVRSFANEEEEAEVYLRKLQQVYKLNRKEAXAYMYYVWGSGLTLLVVQVSIL

SEQ ID NO: 349 - protein, 219 aa, Homo sapiens
VTILCIDLGTDMVPAISLAYEQAESDIMKRQPRNPKTDKLVNERLISMAYGQIGMIQALGGFFTYFVILAENGFLPIHLLGLRVDWDDRWINDVEDSYGQQWTYEQRKIVEFTCHTAFFVSIVVVQWADLVICKTRRNSVFQQGMKNKILIFGLFEETALAAFLSYCPGMGVALRMYPLKPTWWFCAFPYSLLIFVYDEVRKLIIRRRPGGWVEKETYY

SEQ ID NO: 350 - protein, 73 aa, Homo sapiens
FSSSMSLSFLPFLPFLSPCSETAAGSYLSRPTPFPMVAVLSAGAGSCRWRIREKSTEQLPAERAGPGEPSGGS

SEQ ID NO: 351 - protein, 296 aa, Homo sapiens
MFSLSWQLSLVTFMGFPIIMMVSNIYGKYYKRLSKEVQNALARASNTAEETISAMKTVRSFANEEEEAEVYLRKLQQVYKLNRKEAAAYMYYVWGSGLTLLVVQVSILYYGGHLVISGQMTSGNLIAFIIYEFVLGDCMENVSFSLSPGKVTALVGPSGSGKSSCVNILENFYPLEGGRVLLDGKPISAYDHKYLHRVISLVSQEPVLFARSITDNISYGLPTVPFEMVVEAAQKANAHGFIMELQDGYSTETGEKGAQLSGGQKQRVAWPGLWCGTPQSSSWMKPPALWMPRASI

SEQ ID NO: 352 - protein, 446 aa, Homo sapiens
MFSLSWQLSLVTFMGFPIIMMVSNIYGKYYKRLSKEVQNALARASNTAEETISAMKTVRSFANEEEEAEVYLRKLQQVYKLNRKEAAAYMYYVWGSGLTLLVVQVSILYYGGHLVISGQMTSGNLIAFIIYEFVLGDCMESVGSVYSGLMQGVGAAEKVFEFIDRQPTMVHDGSLAPDHLEGRVDFENVTFTYRTRPHTQVLQNVSFSLSPGKVTALVGPSGSGKSSCVNILENFYPLEGGRVLLDGKPISAYDHKYLHRVISLVSQEPVLFARSITDNISYGLPTVPFEMVVEAAQKANAHGFIMELQDGYSTETGEKGAQLSGGQKQRVAMARALVRNPPVLILDEATSALDAESEYLIQQAIHGNLQKHTVLIIAHRLSTVEHAHLIVVLDKGRVVQQGTHQQLLAQGGLYAKLVQRQMLGLQPAADFTAGHNEPVANGSHKA

SEQ ID NO: 353 - protein, 35 aa, Homo sapiens
KFKQVIKSFYKIHLAKEILSMNIKLRKVLYVFLVN

SEQ ID NO: 354 - protein, 27 aa, Homo sapiens
MAIFCFSLCSLGSILGKGMSTFGSISV

SEQ ID NO: 355 - protein, 99 aa, Homo sapiens [sequence omitted]

SEQ ID NO: 356 - protein, 99 aa, Homo sapiens [sequence omitted]

SEQ ID NO: 357 - protein, 99 aa, Homo sapiens
  SITE (75): Xaa equals any of the naturally occurring L-amino acids
MGRVSIQQLGVLVALPVPLLLLGCGSALHPGAPRSIPHTMPSTREVGQTRPGPCQPSVPRFSHWLHRMVAFSLPXSQSCSEGAWRSTLSHQGQLETKAI

SEQ ID NO: 358 - protein, 67 aa, Homo sapiens
PIPWLCPPSPTLPLLSIFFLPTHPPPPSRRGGLGRPRPSLEKPSLSSAVVPPPNPITAAHPILTVIL

SEQ ID NO: 359 - protein, 4 aa, Homo sapiens
APRG

SEQ ID NO: 360 - protein, 71 aa, Homo sapiens
MQNRSPAFCFLLMYLLCTCVTRVLLSIIFNLIRAYLWSWHDVTPCVRVGITPVYLFLSSAAHNARHIVGTL

SEQ ID NO: 361 - protein, 71 aa, Homo sapiens; identical to SEQ ID NO: 360

SEQ ID NO: 362 - protein, 51 aa, Homo sapiens [sequence omitted]

SEQ ID NO: 363 - protein, 51 aa, Homo sapiens [sequence omitted]

SEQ ID NO: 364 - protein, 53 aa, Homo sapiens
  SITE (41): Xaa equals any of the naturally occurring L-amino acids
SCFLALKSILAVCGGSHLPPALWEASGGGLVPNSCSPGDPXVLERPPPRWSSS

SEQ ID NO: 365 - protein, 110 aa, Homo sapiens
  SITE (97): Xaa equals any of the naturally occurring L-amino acids
MDNRFATAFVIACVLSLISTIYMAASIGTDFWYEYRSPVQENSSDLNKSIWDEFISDEADEKTYNDALFRYNGTVGLWRRCITIPKNMHWYSPPERXESFDVVTKCVSSH

SEQ ID NO: 366 - protein, 165 aa, Homo sapiens
  SITE (2): Xaa equals any of the naturally occurring L-amino acids
  SITE (4): Xaa equals any of the naturally occurring L-amino acids
  SITE (5): Xaa equals any of the naturally occurring L-amino acids
  SITE (148): Xaa equals any of the naturally occurring L-amino acids
RXTXXHFARTYPGIHLRIGSDWKNACAMLKDGTAGSHFMASPQCVGYSRSTAAPLTMTMCLPDLKEIQRAVKLWVRSLDAQSVYVATDSESYVPELQQLFKGKVKVVSLKPEVAQVDLYILGQADHFIGNCVSSFTAFVKRERDLQGXPSSFFGMDRPPKLRDEF

SEQ ID NO: 367 - protein, 177 aa, Homo sapiens
LVLWTRFYRGDMSLHSSPTLPTSLYQSCDLSVGGPSLLTWVWRRERRCCKVFSVSHCLEAGPAKAWAHSCTGSPRGRTGWGSRACEALGKGMGLWGRGGMGFRSICTIRKVLRSFFLEGTLSSLSLFLDLGLELRMGRCAQGGTHQSTREGGYLGVSQGLCQCLQPTSRSLEFGEWG

SEQ ID NO: 368 - protein, 184 aa, Homo sapiens
MDNRFATAFVIACVLSLISTIYMAASIGTDFWYEYRSPVQENSSDLNKSIWDEFISDEADEKTYNDALFRYNGTVGLWRRCITIPKNMHWYSPPERTESFDVVTKCVSFTLTEQFMEKFVDPGNHNSGIDLLRTYLWRCQFLLPFVSLGLMCFGALIGLCACICRSLYPTIATGILHLLADTML

SEQ ID NO: 369 - protein, 211 aa, Homo sapiens
  SITE (64): Xaa equals any of the naturally occurring L-amino acids
  SITE (113): Xaa equals any of the naturally occurring L-amino acids
STHASGRTCALPAAATPRRVGAAAPGCAQGRATDGARRAELRREPAVVAHRHGHAGAHQGGAQXAAQPHRRLQVPQAQAGAHLAPGRESEDPQESEHGAGVHGEPAARAGGAXQAESPQPRQQRLPAAAPAPGARVLSPRAGRMRGHPPQGAGSRGGVVGAPDLERVRPWGPPLPECAQELREGAAPGDSPPPRVPRTRQAGPPAPGGASA

SEQ ID NO: 370 - protein, 225 aa, Homo sapiens
  SITE (11): Xaa equals any of the naturally occurring L-amino acids
  SITE (112): Xaa equals any of the naturally occurring L-amino acids
  SITE (166): Xaa equals any of the naturally occurring L-amino acids
RPDLERVRPWXPPLPECAQELREGAAPGIPPRGCPGLGRGAPDSTSWTPCSRGGERMTPPPSRCLFPPRGRPVLHKPARLGCPFVHRAGKGAPRGRSSKPCLSFTFTFFFFXFGREKNRVFDSALFMFLLGNKRWLCVCVFSCVGFLKKWEEEKKILRPFPRSRSXLRFFRPVPPPFFVLFCFVLLRVHIPVCNPWFARFSVFSKVSLRQKPRAEFLGLEGQNFP

SEQ ID NO: 371 - protein, 68 aa, Homo sapiens [sequence omitted]

SEQ ID NO: 372 - protein, 62 aa, Homo sapiens
VIPFYIHYFVYFNCFILVTLPFKIFKLPIVRCQWEWTPDGQIYKWQWLDQTRTLEDGRVGAK

SEQ ID NO: 373 - protein, 29 aa, Homo sapiens
  SITE (11): Xaa equals any of the naturally occurring L-amino acids
  SITE (13): Xaa equals any of the naturally occurring L-amino acids
IPLWFISVSFXMXRFTILNQYHVTCRCQN

SEQ ID NO: 374 - protein, 68 aa, Homo sapiens [sequence omitted]

SEQ ID NO: 375 - protein, 57 aa, Homo sapiens
  SITE (42): Xaa equals any of the naturally occurring L-amino acids
  SITE (44): Xaa equals any of the naturally occurring L-amino acids
LLSAMLPGENEIVAWINESVCVARSGLALDVDGAPALSPQLXSXKISNLEENGRTVE

SEQ ID NO: 376 - protein, 43 aa, Homo sapiens [sequence omitted]

SEQ ID NO: 377 - protein, 24 aa, Homo sapiens
SACFCCAASSLFSSFSIVSPLWKK

SEQ ID NO: 378 - protein, 477 aa, Homo sapiens
  SITE (49): Xaa equals any of the naturally occurring L-amino acids
  SITE (57): Xaa equals any of the naturally occurring L-amino acids
  SITE (105): Xaa equals any of the naturally occurring L-amino acids
  SITE (109): Xaa equals any of the naturally occurring L-amino acids
  SITE (152): Xaa equals any of the naturally occurring L-amino acids
  SITE (194): Xaa equals any of the naturally occurring L-amino acids
  SITE (197): Xaa equals any of the naturally occurring L-amino acids
  SITE (198): Xaa equals any of the naturally occurring L-amino acids
  SITE (203): Xaa equals any of the naturally occurring L-amino acids
  SITE (459): Xaa equals any of the naturally occurring L-amino acids
  SITE (463): Xaa equals any of the naturally occurring L-amino acids
  SITE (468): Xaa equals any of the naturally occurring L-amino acids
MVNACWCGLLAALSLLLDASTDEAATENILKAELTMAALCGKLGLVTSXNAFITAIXKGSLPPHYALTVLNTTTAATLSNKSYSVQGQSVMMISPSSESHQQVVXVGQXLAVQPQGTVMLTSKNIQCMRTLLNLAHCHGAVLGTSWQLVLAXLQHLVWILGLKPSSGGALKPGRAVEGPSTVLTTAVMTDLPVXSNXXSRLFXSSQYLDDVSLHHLINALCSLSLEAMDMAYGNNKEPSLFAVAKLLETGLVNMHRIEILWRPLTGHLLEVCQHPNSRMREWGAEALTSLIKAGLTFNHDPPLSQNQRLQLLLLNPLKEMSNINHPDIRLKQLECVLQILQSQGDSLGPGWPLVLGVMGAIRNDQGESLIRTAFQCLQLVVTDFLPTMPCTCLQIVVDVAGSFGLHNQELNISLTSIGLLWNISDYFFQRGETIEKELNKEEAAQQKQAEEKGVGLNRXFHPXPAFDXWGYALCKIG

SEQ ID NO: 379 - protein, 29 aa, Homo sapiens
NSQYFTTNIALMFLFKKKKVYGCLHLSTV

SEQ ID NO: 380 - protein, 70 aa, Homo sapiens [sequence omitted]

SEQ ID NO: 381 - protein, 67 aa, Homo sapiens [sequence omitted]

SEQ ID NO: 382 - protein, 79 aa, Homo sapiens
  SITE (23): Xaa equals any of the naturally occurring L-amino acids
  SITE (45): Xaa equals any of the naturally occurring L-amino acids
MGCCSKKYWQLLLGAAPWGVIPXLLLWMGTRAPHFKDSVSQGLPXKAEESRANFNQFLVLLMPKEMIVLTIVHPIVRRA

SEQ ID NO: 383 - protein, 39 aa, Homo sapiens
MFLVSPSVSSVVSSLLSIFWLMHLGQVWLGSMETHPITS

SEQ ID NO: 384 - protein, 39 aa, Homo sapiens; identical to SEQ ID NO: 383

SEQ ID NO: 385 - protein, 39 aa, Homo sapiens; identical to SEQ ID NO: 383

SEQ ID NO: 386 - protein, 198 aa, Homo sapiens
  SITE (9): Xaa equals any of the naturally occurring L-amino acids
  SITE (12): Xaa equals any of the naturally occurring L-amino acids
  SITE (97): Xaa equals any of the naturally occurring L-amino acids
  SITE (164): Xaa equals any of the naturally occurring L-amino acids
  SITE (196): Xaa equals any of the naturally occurring L-amino acids
PDPNARRGXNAXSTRTDHEHRTYRLYRRPSRFRDSPAQRPYPAAGYVETVARAHEAAGFDRALVAFHSNSPDSTLIAAHAASVTQKLQFLIAHRPGXAQPTLAARQFATLDVFNGGRTAVHIITGGDDRELRADGSHIGKDERYARTDEYLSVVRQEWTHEQPXDFKGTYYQVEGAHSTVKSPQQPHIPLYFGGSXRG

SEQ ID NO: 387 - protein, 34 aa, Homo sapiens
ELGRLRHPTQGKPACHIECTALIKFTHDNSAFYN

SEQ ID NO: 388 - protein, 207 aa, Homo sapiens
  SITE (105): Xaa equals any of the naturally occurring L-amino acids
  SITE (110): Xaa equals any of the naturally occurring L-amino acids
  SITE (111): Xaa equals any of the naturally occurring L-amino acids
  SITE (116): Xaa equals any of the naturally occurring L-amino acids
  SITE (129): Xaa equals any of the naturally occurring L-amino acids
  SITE (133): Xaa equals any of the naturally occurring L-amino acids
MRPWRFGWPRTLASQLSLIFLISLVCAHGLSFSAQFYERYISARTVMLGNLENDVSTSVAILDRLPANERAIGWRVLRPAELPVLLNAGEAGEPMTSNDVPMAAXFDCGXXGRALXPDLSRYSRHPETXPGAXDPGRWQPDHPRRTPRRPARSLLVAGGAGAATGAAARLHLGRGAPGRAPADTPGPCGRNPRPERSPHTPGRNRPE

SEQ ID NO: 389 - protein, 18 aa, Homo sapiens
  SITE (15): Xaa equals any of the naturally occurring L-amino acids
  SITE (17): Xaa equals any of the naturally occurring L-amino acids
GWPRWRRERCANTPXVXL

SEQ ID NO: 390 - protein, 435 aa, Homo sapiens
MRPWRFGWPRTLASQLSLIFLISLVCAHGLSFSAQFYERYISARTVMLGNLENDVSTSVAILDRLPANERASWLARLDRQNYRYLLNAGEAGEPMTSNDVPMAATSIADALGEHYALTFRDIPGIQKHFQVHLTLADGNPITLDVRPAALPVAYWLPVVLVLQLALLLGCTWVAVRLAVRPLTRLARAVETLDPNAHPTPLDETGPSEVAHAAAAFNAMQQRIAEYLKERMQILAAISHDLQTPITRMKLRAEFMDDSADREKLWSDLSEMEHLVREGVAYARSVHGATEASHRIDLDAFLDSLVFDYQDMQKQVSLRGKSALILDTRPHALRRVLVNLVDNALKFAGNAELEVGSTANGQLSIKVLDQGPGIAEDELAQVLQPFYRVESSRNRGTGGTGLGLAIAQQLAVAIGGTLTLSNRVEGGLCAEIRLSL

SEQ ID NO: 391 - protein, 34 aa, Homo sapiens
CKWVQNGGHPNVESSKYHCHEPKASLYTLEESTL

SEQ ID NO: 392 - protein, 28 aa, Homo sapiens
LLLCKFKKVNYFLKVLISNFSIWAYDHH

SEQ ID NO: 393 - protein, 36 aa, Homo sapiens
MAGHPTLILLCKWAFHLTGAICEPYLNQTLPTQACL

SEQ ID NO: 394 - protein, 36 aa, Homo sapiens; identical to SEQ ID NO: 393

SEQ ID NO: 395 - protein, 41 aa, Homo sapiens
  SITE (15): Xaa equals any of the naturally occurring L-amino acids
MWLMLILSLTSGETXALRGCCSSSWTYGESAAGPADQAPCL

SEQ ID NO: 396 - protein, 41 aa, Homo sapiens
MWLMLILSLTSGETEALRGCCSSSWTYGESAAGPADQAPCL

SEQ ID NO: 397 - protein, 20 aa, Homo sapiens
IFALSLSFYTCIHIHTHRHT

SEQ ID NO: 398 - protein, 117 aa, Homo sapiens [sequence omitted]

SEQ ID NO: 399 - protein, 183 aa, Homo sapiens [sequence omitted]

SEQ ID NO: 400 - protein, 38 aa, Homo sapiens
MVSKHSLNLHFFYWKGGCACFTSEPRVFVVVELSLLDC

SEQ ID NO: 401 - protein, 38 aa, Homo sapiens; identical to SEQ ID NO: 400

SEQ ID NO: 402 - protein, 92 aa, Homo sapiens
  SITE (10): Xaa equals any of the naturally occurring L-amino acids
  SITE (49): Xaa equals any of the naturally occurring L-amino acids
IGPLLVYVSXTHESLKLWQLKETLIQSFPALVRSLGPGLLFGPPIATGXTQAGDMADKSQAGPRGSVSSVAWGPFPGGSGALAFCPLILRSH

SEQ ID NO: 403 - protein, 24 aa, Homo sapiens
MHIFTILYPISEGFFKIFNFIVFF

SEQ ID NO: 404 - protein, 69 aa, Homo sapiens
  SITE (1): Xaa equals any of the naturally occurring L-amino acids
XSGDLPTSAFPKCWDYRPEPPCPAQAQTSVLCVTSWSRLTVSTLTSTSQAEGVRALPIWPSSQVCSIQP

SEQ ID NO: 405 - protein, 110 aa, Homo sapiens [sequence omitted]

SEQ ID NO: 406 - protein, 79 aa, Homo sapiens
  SITE (67): Xaa equals any of the naturally occurring L-amino acids
MVFFQIQSLLSFLASSLSIIFLLPRCLIPPANGTAGSSCSEFQTLHTFHPQASCAHAGPSNLYTFLXLFDLSAKVSPLM

SEQ ID NO: 407 - protein, 79 aa, Homo sapiens
MVFFQIQSLLSFLASSLSIIFLLPRCLIPPANGTAGSSCSEFQTLHTFHPQASCAHAGPSNLYTFLRLFDLSAKVSPLM

SEQ ID NO: 408 - protein, 325 aa, Homo sapiens
  SITE (10): Xaa equals any of the naturally occurring L-amino acids
  SITE (136): Xaa equals any of the naturally occurring L-amino acids
  SITE (186): Xaa equals any of the naturally occurring L-amino acids
  SITE (234): Xaa equals any of the naturally occurring L-amino acids
VPPAVCPAGXFCQNQCFTKRQYPETKIIKTDGKGWGLVAKRDIRKGEFVNEYVGELIDEEECMARIKHAHENDITHFYMLTIDKDRIIDAGPKGNYSRFMNHSCQPNCETLKWTVNGDTRVGLFAVCDIPAGTELXFNYNLDCLGNEKTVCRCGASNCSGFLGDRPKTSTTLSSEEKGKKTKKKTXRRRAKGEGKRQSEDECFRCGDGGQLVLCDRKFCTKAYHLSCLGLGKRXFGKWECPWHHCDVCGKPSTSFCHLCPNSFCKEHQDGTAFSCTPDGRSYCCEHDLGAASVRSTKTEKPPPEPGKPKGKRRRRRGWRRVTEGK

SEQ ID NO: 409 - protein, 161 aa, Homo sapiens
  SITE (123): Xaa equals any of the naturally occurring L-amino acids
  SITE (129): Xaa equals any of the naturally occurring L-amino acids
  SITE (145): Xaa equals any of the naturally occurring L-amino acids
  SITE (146): Xaa equals any of the naturally occurring L-amino acids
  SITE (157): Xaa equals any of the naturally occurring L-amino acids
MTTWSCLVAMIVSGVITAVWAVRAAPIWRSQVKQKMRIGKQGNCRPPRCICSALGLLAPWMAVVLSQLSVRCVVSWVQGKPSSPRPRGSAASPAPGATPPTPRKPVSWLGYRENHRPKKPKSXTRCLVXQNWSLPPISKDRTAGXXDTNRTRRSGLXLRLG

SEQ ID NO: 410 - protein, 57 aa, Homo sapiens
RPVSTKKKKVSWAWWCTSIAPATLEAKVRGLLEPGRSVSAVSCDPANALSLGSVRPC

SEQ ID NO: 411 - protein, 58 aa, Homo sapiens
VLCLQIYCQTRFSSSLSTSFTVLNCMYRSVILSELTFVKDKRSVLDRYFPFACGCPAP

SEQ ID NO: 412 - protein, 141 aa, Homo sapiens
MKSTLSIFSLWVMIFVLCLQIYCQTRFSSSLSTSFTVLNCMYRSVILSELTFVKDKRSVLDRLFFLLHVVVQHHEDSSFSTELSLYFCQRSDLPLKSLSNLSTSHHLHFQSLRTRGRTRGSTREFRTGTCRRTSFPYSESY

SEQ ID NO: 413 - protein, 141 aa, Homo sapiens [sequence omitted]

SEQ ID NO: 414 - protein, 57 aa, Homo sapiens
MLETLSQFISILFVLLWIISDLILCFLKCGNPGTLDMVLPIWTNQYIHSSRSILSFI

SEQ ID NO: 415 - protein, 57 aa, Homo sapiens [sequence omitted]

SEQ ID NO: 416 - protein, 85 aa, Homo sapiens
  SITE (14): Xaa equals any of the naturally occurring L-amino acids
  SITE (59): Xaa equals any of the naturally occurring L-amino acids
  SITE (68): Xaa equals any of the naturally occurring L-amino acids
LLFLLGMAWFNDWXAALYMPAFCAILVALFAFAMMRDTPQSCGLPPIEEYKNDYPDDYXEKAEQELTXKQPGGRRLWLHPAYTAA

SEQ ID NO: 417 - protein, 66 aa, Homo sapiens
MLFMGFVPWATSSIAVMFVLLFLCGWFQGMGWPPCGRTMVHWWSQKERGGIVSVWNCAHNVGGWVF

SEQ ID NO: 418 - protein, 152 aa, Homo sapiens
MLFMGFVPWATSSIAVMFVLLFLCGWFQGMGWPPCGRTMVHWWSQKERGGIVSVWNCAHNVGGGIPPLLFLLGMAWFNDWHAALYMPAFCAILVALFAFAMMRDTPQSCGLPPIEEYKNDYPDDYNEKAEQELTAKQPGGRRLWLHPAYTAA

SEQ ID NO: 419 - protein, 85 aa, Homo sapiens [sequence omitted]

SEQ ID NO: 420 - protein, 85 aa, Homo sapiens [sequence omitted]

SEQ ID NO: 421 - protein, 64 aa, Homo sapiens
MWETYIWLVLTFAQKACCMKLTATMLKQIHIKKCRSIQWLLRVNSFMESSMSLSSKIRPHQRRN

SEQ ID NO: 422 - protein, 64 aa, Homo sapiens; identical to SEQ ID NO: 421

SEQ ID NO: 423 - protein, 47 aa, Homo sapiens
SQLLRKLRWEDGLSLGGRVCSEPRLHHCTPAWVIGPGLVLTTTTEKK

SEQ ID NO: 424 - protein, 54 aa, Homo sapiens
  SITE (4): Xaa equals any of the naturally occurring L-amino acids
  SITE (23): Xaa equals any of the naturally occurring L-amino acids
IETXRFGGKQMELQEIKSIISSXMWWLMPLILVTQEAEAGGSLEARSLRPPWAT

SEQ ID NO: 425 - protein, 199 aa, Homo sapiens
  SITE (195): Xaa equals any of the naturally occurring L-amino acids
KAGTPAGTGPEFPGRPTRPIYIRRYVFKLGVLGWGAPALLVLLSLSVKSSVYGPCTIPVFDSWENGTGFQNMSICWVRSPVVHSVLVMGYGGLTSLFNLVVLAWALWTLRRLRERADAPSVRACHDTVTVLGLTVLLGTTWALAFFSFGVFLLPQLFLFTILNSLYGFFLFLWFCSQRCRSEAEAKAQIEAFSSXQTTQ

SEQ ID NO: 426 - protein, 160 aa, Homo sapiens
  SITE (133): Xaa equals any of the naturally occurring L-amino acids
  SITE (146): Xaa equals any of the naturally occurring L-amino acids
MSSLASWWPSYGRTQMNSRASVAGPSWLFCSAPFPHCLSYRSHCSSSCLTRPPGAWQRCASTSCWGPWSSRSWPRGPLGPTPRPSWSGWPDGGGAAWRWMCSPSARSATRPRWSLGPPGSSWLGGSCRAEAWXRLPGAGLCHCTPXTHGRTWLAATLCWT

SEQ ID NO: 427 - protein, 13 aa, Homo sapiens
WPSSSRTLSSSRR

SEQ ID NO: 428 - protein, 47 aa, Homo sapiens
ILKSEPKLVSFINILGKEERKKEGGRERKKERKKERKKERKKKKKNS

SEQ ID NO: 429 - protein, 80 aa, Homo sapiens
MSLIWRDVYLYGCGCICHGRCCAGFPQHSRHVWRTNAGLILPGNRVPFCELEGCTRRSSYWNHLVILGGHWGLHLPCTSL

SEQ ID NO: 430 - protein, 80 aa, Homo sapiens; identical to SEQ ID NO: 429

SEQ ID NO: 431 - protein, 107 aa, Homo sapiens
  SITE (7): Xaa equals any of the naturally occurring L-amino acids
  SITE (13): Xaa equals any of the naturally occurring L-amino acids
  SITE (17): Xaa equals any of the naturally occurring L-amino acids
LGKVGNXCRYRSXIPGXTHASGLESTFELPEEFRFLLVSFVFQTHEMATDDKTSPTLDSANDLPRSPTSSSHLTHFKPLTPDQDEPPFKSAYSSFVNLFRFNKGKTY

SEQ ID NO: 432 - protein, 46 aa, Homo sapiens
MCCRAISGCCGTCLACLCSTASGAPQPWPCSRQSTWRLIPRPSAPT

SEQ ID NO: 433 - protein, 43 aa, Homo sapiens
  SITE (5): Xaa equals any of the naturally occurring L-amino acids
  SITE (35): Xaa equals any of the naturally occurring L-amino acids
  SITE (36): Xaa equals any of the naturally occurring L-amino acids
SGFVXAWSILTPGCISPAGEKCRGGKQSLGTNYFXXVLLATDS

SEQ ID NO: 434 - protein, 76 aa, Homo sapiens
  SITE (73): Xaa equals any of the naturally occurring L-amino acids
MHLPLSTKGILPRILLLFIKTLFAFLLSDQCKGLAHLWLRRRECGPGGLTCAAEELKSYTSIFAPKLGVVGGXEMK

SEQ ID NO: 435 - protein, 38 aa, Homo sapiens
  SITE (12): Xaa equals any of the naturally occurring L-amino acids
  SITE (14): Xaa equals any of the naturally occurring L-amino acids
  SITE (38): Xaa equals any of the naturally occurring L-amino acids
PISTKNRKISRXWXCVPVIPATREAEAGESLEPRRWRX

SEQ ID NO: 436 - protein, 74 aa, Homo sapiens
LYGKSKTEVKISPVSNLHSFRLQGVSLYVEAGSLVEFQGSKRGTNICRFCLLWGNSFNHQENSSIGFICSGLPR

SEQ ID NO: 437 - protein, 58 aa, Homo sapiens
MAWSRAAWTVMRSLLICWLVSAYILATVTDVQGSHIGIPGSLLELRHHPRSNESESAC

SEQ ID NO: 438 - protein, 58 aa, Homo sapiens; identical to SEQ ID NO: 437

SEQ ID NO: 439 - protein, 14 aa, Homo sapiens
WRRQARVESLLPML

SEQ ID NO: 440 - protein, 60 aa, Homo sapiens
MWDLSPSTLSLLLLLSPCDVPALALPSAMSKSLLSLLRSRCCHASWTACRTVNQLNLFSL

SEQ ID NO: 441 - protein, 6 aa, Homo sapiens
PCDVHF

SEQ ID NO: 442 - protein, 60 aa, Homo sapiens; identical to SEQ ID NO: 440

SEQ ID NO: 443 - protein, 52 aa, Homo sapiens
MVEHLHLTYHYLKLPCIFACLLLYWFSPLLNSKLQDSRDLVCFLNQWHTVCA

SEQ ID NO: 444 - protein, 8 aa, Homo sapiens
PCCFLCLV

SEQ ID NO: 445 - protein, 87 aa, Homo sapiens
PCCFLCLVCSSSDSHKASSSSSPTLSTPLPCLFSSHTSLLRNFHIASLLLTPPQAPQGWAFPASLTAAALVPGPVPGTQLVARMLIT

SEQ ID NO: 446 - protein, 52 aa, Homo sapiens; identical to SEQ ID NO: 443

SEQ ID NO: 447 - protein, 31 aa, Homo sapiens
MPLSRFWLLLLFLPSHISVLSLIRYPSVKEY

SEQ ID NO: 448 - protein, 31 aa, Homo sapiens; identical to SEQ ID NO: 447

SEQ ID NO: 449 - protein, 43 aa, Homo sapiens
VGASTAHGLLLPLLHIHGGSANSSAPHHPNPWPQADRAWSHYL

SEQ ID NO: 450 - protein, 43 aa, Homo sapiens; identical to SEQ ID NO: 449

SEQ ID NO: 451 - protein, 26 aa, Homo sapiens
  SITE (9): Xaa equals any of the naturally occurring L-amino acids
QFKQYRYAXGMLRGPHIPVSYPNMYF

SEQ ID NO: 452 - protein, 62 aa, Homo sapiens
  SITE (58): Xaa equals any of the naturally occurring L-amino acids
  SITE (62): Xaa equals any of the naturally occurring L-amino acids
MHFAAPFQLQSQTFRYEVGSVRKSQQVLKAVVTALLIPAFSSLSSKACKASFGKKKKXKGKX

SEQ ID NO: 453 - protein, 58 aa, Homo sapiens
  SITE (37): Xaa equals any of the naturally occurring L-amino acids
  SITE (40): Xaa equals any of the naturally occurring L-amino acids
  SITE (47): Xaa equals any of the naturally occurring L-amino acids
EQLLESSLSSTSCETLSSYASGRWLLSPHTPACRVRXYIXGTDRMWXPRSMPSATDIA

SEQ ID NO: 454 - protein, 64 aa, Homo sapiens
MSATHPVPWSVTTWCFFCTWNATCSAGPSPGHRVSSSTASFIRVSYFPSYFSSPLSVTCVPVSS

SEQ ID NO: 455 - protein, 318 aa, Homo sapiens
EAKAQFWLLHSYLFCHSSNVPDLLRPRMTNDSEGKMGFKHPKIMGNFRGHALPGTFFFIIGLWWCTKSILKYICKKQKRTCYLGSKTLFYRLEILEGITIVGMALTGMAGEQFIPGGPHLMLYDYKQGHWNQLLGWHHFTMYFFFGLLGVADILCFTISSLPVSLTKLMLSNALFVEAFIFYNHTHGREMLDIFVHQLLVLVVFLTGLVAFLEFLVRNNVLLELLRSSLILLQGSWFFQIGFVLYPPSGGPAWDLMDHENILFLTICFCWHYAVTIVIVGMNYAFITWLVKSRLKRLCSSEVGLLKNAEREQESEEEM

SEQ ID NO: 456 - protein, 24 aa, Homo sapiens
  SITE (2): Xaa equals any of the naturally occurring L-amino acids
LXKLKMFYKFAFKFSYEAICKLHT

SEQ ID NO: 457 - protein, 19 aa, Homo sapiens
MVSILYLGLFFLNSSVLYA

SEQ ID NO: 458 - protein, 282 aa, Homo sapiens
VNRPSWIMGNFRGHALPGTFFFIIGLWWCTKSILKYICKKQKRTCYLGSKTLFYRLEILEGITIVGMALTGMAGEQFIPGGPHLMLYDYKQGHWNQLLGWHHFTMYFFFGLLGVADILCFTISSLPVSLTKLMLSNALFVEAFIFYNHTHGREMLDIFVHQLLVLVVFLTGLVAFLEFLVRNNVLLELLRSSLILLQGSWFFQIGFVLYPPSGGPAWDLMDHENILFLTICFCWHYAVTIVIVGMNYAFITWLVKSRLKRLCSSEVGLLKNAEREQESEEEM

SEQ ID NO: 459 - protein, 19 aa, Homo sapiens
MVSILYLGLFFLNSSVLYA

SEQ ID NO: 460 - protein, 47 aa, Homo sapiens [sequence omitted]

SEQ ID NO: 461 - protein, 136 aa, Homo sapiens
SAQALHHPPHQGPPLFPSSAHPTVPPYPSQATHHTTLGPGPQHQPSGTGPHCPLPVTGPHLQPQGPNSIPTPTASGFCPHPGSVALPWGFKDLSRHLQCLDRFQFTEHRCHQHFKTITMGQGGIKMDSKNIFLNVL

SEQ ID NO: 462 - protein, 58 aa, Homo sapiens
  SITE (52): Xaa equals any of the naturally occurring L-amino acids
MAVFLISSSYFLLCVFTIRSLRAWVLPFTSVPRAQGGSCCRSQWLYKTLPPXLVCKPV

SEQ ID NO: 463 - protein, 58 aa, Homo sapiens
MAVFLISSSYFLLCVFTIRSLRAWVLPFTSVPRAQGGSCCRSQWLYKTLPPCLVCKPV

SEQ ID NO: 464 - protein, 58 aa, Homo sapiens; identical to SEQ ID NO: 462
  SITE (52): Xaa equals any of the naturally occurring L-amino acids

SEQ ID NO: 465 - protein, 58 aa, Homo sapiens
  SITE (19): Xaa equals any of the naturally occurring L-amino acids
  SITE (25): Xaa equals any of the naturally occurring L-amino acids
  SITE (28): Xaa equals any of the naturally occurring L-amino acids
  SITE (46): Xaa equals any of the naturally occurring L-amino acids
SRCAGAPLQNNGPVREATXLTLQNXGPXREATHLTLQNNGPMREAXHLVLHKWSICLR

SEQ ID NO: 466 - protein, 27 aa, Homo sapiens
MPYGPDPILSNVLLAGYIVLQTLSCPR

SEQ ID NO: 467 - protein, 139 aa, Homo sapiens
MVTVGLVICFSEWCCAGGLSAEQTVSDKHIDALMKEKEAGKSSGHYDPRHQGQALEEPSVHSCIYYLLTEQTQKVSTRTSLLRYRWPCEEVGWCWGLDLTGCPVVIQHEGVAGSEIIISDYPLTNENIKGIPEICLFHI

SEQ ID NO: 468 - protein, 43 aa, Homo sapiens [sequence omitted]

SEQ ID NO: 469 - protein, 38 aa, Homo sapiens
CFLLADVGNSIIFITNFMEQHQFRVKLENQCILIFVDY

SEQ ID NO: 470 - protein, 4 aa, Homo sapiens
VGFL

SEQ ID NO: 471 - protein, 77 aa, Homo sapiens
APRRQAQEWLGRTGNTFAPRLAVTSVKADRREMGPSSSVVAASPSLQDRVIITINNPSRVKKKKKKKKKKKKKKKKK

SEQ ID NO: 472 - protein, 245 aa, Homo sapiens
AWRRRRSGTSGKATWWCSGLRRASPTPSRRVQSWATAVMWKPSPSSSPASWSCTALRAPQSCLRAATVRPVTLQARADSPTVPEPVHRPQDPWHIPGVPEPVHRPQDPWHIPGVPEPVHRPQDPWHIPGVPEPVHRPQDPWPWLQLVPPAELAYCLLMLLLAHCMKQQARPGHPDFLHREAWACLSAAGGLASPGLLLWATARPRASGEAGPGRALVGADAACCPRHSVLSLVDIPSGQVLPQGQ

SEQ ID NO: 473 - protein, 43 aa, Homo sapiens
MAARGRSGVGPPGFLRALALLQLSCGFYWACSRGWMVRGTPHP

SEQ ID NO: 474 - protein, 43 aa, Homo sapiens; identical to SEQ ID NO: 473

SEQ ID NO: 475 - protein, 43 aa, Homo sapiens
MFNLSFFTLYGLCMLKLHSASSWFTLLLLISLFLSVVYCQSTN

SEQ ID NO: 476 - protein, 2 aa, Homo sapiens
LH

SEQ ID NO: 477 - protein, 43 aa, Homo sapiens; identical to SEQ ID NO: 475

SEQ ID NO: 478 - protein, 47 aa, Homo sapiens
MSLLLPPLALLLLLAALVAPATAATAYRPDWNRLSGLTRARVETCGG

SEQ ID NO: 479 - protein, 47 aa, Homo sapiens; identical to SEQ ID NO: 478

SEQ ID NO: 480 - protein, 365 aa, Homo sapiens
  SITE (313): Xaa equals any of the naturally occurring L-amino acids
  SITE (316): Xaa equals any of the naturally occurring L-amino acids
  SITE (333): Xaa equals any of the naturally occurring L-amino acids
  SITE (335): Xaa equals any of the naturally occurring L-amino acids
  SITE (338): Xaa equals any of the naturally occurring L-amino acids
  SITE (339): Xaa equals any of the naturally occurring L-amino acids
  SITE (352): Xaa equals any of the naturally occurring L-amino acids
  SITE (355): Xaa equals any of the naturally occurring L-amino acids
MLSGVWFLSVLTVAGILQTESRKTAKDICKIRCLCEEKENVLNINCENKGFTTVSLLQPPQYRIYQLFLNGNLLTRLYPNEFVNYSNAVTLHLGNNGLQEIRTGAFSGLKTLKRLHLNNNKLEILREDTFLGLESLEYLQADYNYISAIEAGAFSKLNKLKVLILNDNLLLSLPSNVFRFVLLTHLDLRGNRLKVMPFAGVLEHIGGIMEIQLEENPWNCTCDLLPLKAWLDTITVFVGEIVCETPFRLHGKDVTQLTRQDLCPRKSASDSSQRGSHADTHVQRLSPTMNPALNPTRAPKASRPPKMRNRPTXRVXVSKDRQSFGPIMVYQTXVXCAXXLSQQLCLHLSELXQWXECKLPRKEVH

SEQ ID NO: 481 - protein, 23 aa, Homo sapiens
GYWVSFLLHVDGVLAHLTTGGGI

SEQ ID NO: 482 - protein, 191 aa, Homo sapiens
MLSGVWFLSVLTVAGILQTESRKTAKDICKIRCLCEEKENVLNINCENKGFTTVSLLQPPQYRIYQLFLNGNLLTRLYPNEFVNYSNAVTLHLGNNGLQEIRTGAFSGLKTLKRLHLNNNKLEILREDTFLGLESLEYLQADYNYISAIEAGAFSKLNKLKVLILNDNLLLSLPSNVFRFVLLTHLDLRGN

SEQ ID NO: 483 - protein, 845 aa, Homo sapiens
  SITE (477): Xaa equals any of the naturally occurring L-amino acids
MLSGVWFLSVLTVAGILQTESRKTAKDICKIRCLCEEKENVLNINCENKGFTTVSLLQPPQYRIYQLFLNGNLLTRLYPNEFVNYSNAVTLHLGNNGLQEIRTGAFSGLKTLKRLHLNNNKLEILREDTFLGLESLEYLQADYNYISAIEAGAFSKLNKLKVLILNDNLLLSLPSNVFRFVLLTHLDLRGNRLKVMPFAGVLEHIGGIMEIQLEENPWNCTCDLLPLKAWLDTITVFVGEIVCETPFRLHGKDVTQLTRQDLCPRKSASDSSQRGSHADTHVQRLSPTMNPALNPTRAPKASRPPKMRNRPTPRVTVSKDRQSFGPIMVYQTKSPVPLTCPSSCVCTSQSSDNGLNVNCQERKFTNISDLQPKPTSPKKLYLTGNYLQTVYKNDLLEYSSLDLLHLGNNRIAVIQEGAFTNLTSLRRLYLNGNYLEVLYPSMFDGLQSLQYLYLEYNVIKEIKPLTFDALINLQLLXLNNNLLRSLPDNIFGGTALTRLNLRNNHFSHLPVKGVLDQLPAFIQIDLQENPWDCTCDIMGLKDWTEHANSPVIINEVTCESPAKHAGEILKFLGREAICPDSPNLSDGTVLSMNHNTDTPRSLSVSPSSYPELHTEVPLSVLILGLLVVFILSVCFGAGLFVFVLKRRKGVPSVPRNTNNLDVSSFQLQYGSYNTETHDKTDGHVYNYIPPPVGQMCQNPIYMQKEGDPVAYYRNLQEFSYSNLEEKKEEPATPAYTISATELLEKQATPREPELLYQNIAERVKELPSAGLVHYNFCTLPKRQFAPSYESRRQNQDRINKTVLYGTPRKCFVGQSKPNHPLLQAKPQSEPDYLEVLEKQTAISQL

SEQ ID NO: 484 - protein, 141 aa, Homo sapiens
  SITE (125): Xaa equals any of the naturally occurring L-amino acids
  SITE (131): Xaa equals any of the naturally occurring L-amino acids
FCLLHVPASCYCSFSNGITSPCHALGSPSLSISVLLSWLNPSTILNTGSSCPIPRLTLSDLPISLAFHAPLPPPPGFNWVRAVFLPLCSASALRTPRGLGGKVLTIFTLCLPLHHLFITSQPLLXQVFTHXLFLQVFDWRE

SEQ ID NO: 485 - protein, 8 aa, Homo sapiens
SHIVTCLG

SEQ ID NO: 486 - protein, 42 aa, Homo sapiens
MGLKNSSLITCFLLAFVVFVLFCLFCFVFLCYFIGKVSGMCS

SEQ ID NO: 487 - protein, 42 aa, Homo sapiens; identical to SEQ ID NO: 486

SEQ ID NO: 488 - protein, 27 aa, Homo sapiens
MRRMASALLLDQLTKALLSGHQNWKAF

SEQ ID NO: 489 - protein, 137 aa, Homo sapiens
  SITE (1): Xaa equals any of the naturally occurring L-amino acids
  SITE (7): Xaa equals any of the naturally occurring L-amino acids
  SITE (33): Xaa equals any of the naturally occurring L-amino acids
XRCFTFXFTDIVIMPKRKFPENTEGKDGSKVTXQEPTRRSARLSAKPAPPKPEPKPRKTSAKKEPGAKISRGAKGKKEEKQEAGKEGTAPSENGETKAEEIHISRSTVNVSTSRGTPPSTLSVKGQIETVRVKGTEN

SEQ ID NO: 490 - protein, 46 aa, Homo sapiens
  SITE (38): Xaa equals any of the naturally occurring L-amino acids
NKPDTGRKILHDLICGILKKKKKKSQIYRVNKRVGYQXQVGGEWEM

SEQ ID NO: 491 - protein, 50 aa, Homo sapiens
MQPPFVLTTTTMISLFLALISTKKVHLTIPQPFTSHSRLSFDVFKRKARA

SEQ ID NO: 492 - protein, 228 aa, Homo sapiens
TQDHQKLCYSALILAMVFSMGEAVPYAHYEHLGTPFAQFLLNIVEDGLPLDTTEQLPDLCVNLLLALNLHLPAADQNVIMAALSKHANVKIFSEKLLLLLNRGDDPVRIFKHEPQPPHSVLKFLQDVFGSPATAAIFYHTDMMALIDITVRHIADLSPGDKLRMEYLSLMHAIVRTTPYLQHRHRLPDLQAILRRILNEEETSPQCQMDRMIVREMCKEFLVLGEAPS

SEQ ID NO: 493 - protein, 13 aa, Homo sapiens
PFHFSTPSITGLF

SEQ ID NO: 494 - protein, 2 aa, Homo sapiens
FL

SEQ ID NO: 495 - protein, 50 aa, Homo sapiens; identical to SEQ ID NO: 491

SEQ ID NO: 496 - protein, 71 aa, Homo sapiens [sequence omitted]

SEQ ID NO: 497 - protein, 14 aa, Homo sapiens
LFILVLHNEDNLYG

SEQ ID NO: 498 - protein, 71 aa, Homo sapiens [sequence omitted]

SEQ ID NO: 499 - protein, 167 aa, Homo sapiens
  SITE (82): Xaa equals any of the naturally occurring L-amino acids
  SITE (88): Xaa equals any of the naturally occurring L-amino acids
  SITE (96): Xaa equals any of the naturally occurring L-amino acids
  SITE (106): Xaa equals any of the naturally occurring L-amino acids
  SITE (111): Xaa equals any of the naturally occurring L-amino acids
GRCLDCFNPFLLSCPRIGLVEQGGVKIEPLPKEVKVYLLTTSSAPYCMHHSLVEFHLKELRNKDTNIEVTFLSSNITSSSKXTIPKQXRYGERNHXPMPTPQCQIXQVKFXFQSSNRVWKKDRTTIIGKFCTALLPVNDREKMVCLPEPVNLQASVTVSCDLKIACV

SEQ ID NO: 500 - protein, 1 aa, Homo sapiens
M

SEQ ID NO: 501 - protein, 14 aa, Homo sapiens
TTEICGTLILREMI

SEQ ID NO: 502 - protein, 67 aa, Homo sapiens
MSLFLTLALCSVLLVHLNVLARNCFYDSGFVVHPWIWLGHSLPYFYFSPLSQRLFSYLWTFIFPCRL

SEQ ID NO: 503 - protein, 67 aa, Homo sapiens; identical to SEQ ID NO: 502

SEQ ID NO: 504 - protein, 5 aa, Homo sapiens
LYLFM

SEQ ID NO: 505 - protein, 65 aa, Homo sapiens
IIYLLFVTKWEIRKKVRKYLRGKSFLLSHVFSTCLPWYIINTDILHTPCKILLKLSSTWHVEYVP

SEQ ID NO: 506 - protein, 151 aa, Homo sapiens [sequence omitted]

SEQ ID NO: 507 - protein, 31 aa, Homo sapiens
LFLPFSMVLFCDPLNSKGSLICGCFRAVLPR

SEQ ID NO: 508 - protein, 151 aa, Homo sapiens
  SITE (130): Xaa equals any of the naturally occurring L-amino acids
MVVAAVYILYLLFLIVRACSELRHMPYVDLRLKFLTALTFVVLVISIAILYLRFGAQVLQDNFVAELSTHYQNSAEFLSFYGLLNFYLYTLAFVYSPSKNALYESQLKDNPAFSMLNDSDDDVIYGSDYXEMPLQNGQAIRAKYKEESDSD

SEQ ID NO: 509 - protein, 51 aa, Homo sapiens [sequence omitted]

SEQ ID NO: 510 - protein, 51 aa, Homo sapiens [sequence omitted]

SEQ ID NO: 511 - protein, 101 aa, Homo sapiens
LRDPENCVECGDGECACGCTHIGYLCVCTVYMQGCVYVCMCIRVWVWVWGVFRECAYTHGCLGMCTCLCVRGVCVCVCMVCVHMYALVCVHTWGVCAYVEV

SEQ ID NO: 512 - protein, 90 aa, Homo sapiens
  SITE (5): Xaa equals any of the naturally occurring L-amino acids
MYRGXRVKHPFVFRKLQVTQDDWIVRYRGLKGNAEVVHREQVNLPRTMGLRHALLTRRATRSMGAICVAGCGIPAQVSLSKRGILLVPKT

SEQ ID NO: 513 - protein, 45 aa, Homo sapiens
  SITE (39): Xaa equals any of the naturally occurring L-amino acids
LGSARHRPHALVLGMSSPFLKKTCSAVTTTKKHGEDWAXDMMFSS

SEQ ID NO: 514 - protein, 35 aa, Homo sapiens
  SITE (15): Xaa equals any of the naturally occurring L-amino acids
  SITE (20): Xaa equals any of the naturally occurring L-amino acids
LTSFGLRAILIFQMXSDVNXIGKHQRNGCKVSGTE

SEQ ID NO: 515 - protein, 50 aa, Homo sapiens [sequence omitted]

SEQ ID NO: 516 - protein, 75 aa, Homo sapiens
SPIIFPLNHYTRISHLCPPDILGWIILGLGGCPVRCRTFSSILGLFLLDASSTPFLSYDRLKCPPGKRWWQNYPW

SEQ ID NO: 517 - protein, 60 aa, Homo sapiens
MNESFYCSAFLPAFIVCWILAILIVLTCGFRMTDYIEHLHEILCHLYIFFGKASISGLST

SEQ ID NO: 518 - protein, 60 aa, Homo sapiens; identical to SEQ ID NO: 517

SEQ ID NO: 519 - protein, 33 aa, Homo sapiens
MAAAWFILLFKHCVHSSSIVDLSFKESSPWDIK

SEQ ID NO: 520 - protein, 12 aa, Homo sapiens
AWYVIITLVFDG

SEQ ID NO: 521 - protein, 15 aa, Homo sapiens
  SITE (10): Xaa equals any of the naturally occurring L-amino acids
  SITE (12): Xaa equals any of the naturally occurring L-amino acids
AWYVVMALTXMXWDF

SEQ ID NO: 522 - protein, 17 aa, Homo sapiens [sequence omitted]

SEQ ID NO: 523 - protein, 33 aa, Homo sapiens; identical to SEQ ID NO: 519

SEQ ID NO: 524 - protein, 85 aa, Homo sapiens
  SITE (32): Xaa equals any of the naturally occurring L-amino acids
LWRYLGFCILCHIWQKTFYLCCHEKGCTMTQXPPQASGPAEAKSEHREKRRKREDRWGKQERRDRDVHILGCQVWHSCSARVALS

SEQ ID NO: 525 - protein, 91 aa, Homo sapiens
  SITE (69): Xaa equals any of the naturally occurring L-amino acids
MRACVCVYACAHMCVCLAFSYLIGCIKCRPKDEGEDYTQSLAVTASVQKSCVWAQNYSLHSCNTYASRXQRALSPGLHNRREKQLCGELVT

SEQ ID NO: 526 - protein, 96 aa, Homo sapiens
MRACVCVYACAHMCVCLAFSYLIGCIKCRPKDEGEDLHPKPGCDSFCPEKLCLGSELLTTFMQYICKQGAESFITGATQQKGKTVMWRAGDLTREA

SEQ ID NO: 527 - protein, 48 aa, Homo sapiens [sequence omitted]

SEQ ID NO: 528 - protein, 4 aa, Homo sapiens
MFKM

SEQ ID NO: 529 - protein, 10 aa, Homo sapiens
IYQHFSLWLG

SEQ ID NO: 530 - protein, 48 aa, Homo sapiens [sequence omitted]

SEQ ID NO: 531 - protein, 22 aa, Homo sapiens
HSDLGLSCPELLLPCIILITFS

SEQ ID NO: 532 - protein, 96 aa, Homo sapiens
MHHHAHLSCYDFLMLLFLLLHPLLPPPPTASLPPSPLICLFLHTVPWNLSLASSHSTHSLRALPFTSAIVYTFTLDHSSEISQLLHPDGCSAPPPG

SEQ ID NO: 533 - protein, 111 aa, Homo sapiens
MHHHAHLSCYDFLMLLFLLLHPLLPPPPTASLPPSPLICLFLHTVPWNLSLASSHSTHSLRALPFTSAIVYTFTLDHSSEISQLLHPDGCSAPPPGCPTGTLNPTSPKLNS

SEQ ID NO: 534 - protein, 70 aa, Homo sapiens
  SITE (20): Xaa equals any of the naturally occurring L-amino acids
  SITE (60): Xaa equals any of the naturally occurring L-amino acids
GRKRDGGWRKGQKAQVEVPXLLARRILWPLGGWSGCVNQSLSQWRAGLVVCVFITGPHPXHTHTRTHCGV

SEQ ID NO: 535 - protein, 70 aa, Homo sapiens [sequence omitted]

SEQ ID NO: 536 - protein, 55 aa, Homo sapiens
MVAVCWCLALTAKVSASCSYMKLRPWPADPWQCWAWTWLPQPCCPATTQTLAWCS

SEQ ID NO: 537 - protein, 40 aa, Homo sapiens
MKCSKVLTQLILFTPLGVCKMSLFYKHNHNSNKPQVVASV

SEQ ID NO: 538 - protein, 40 aa, Homo sapiens; identical to SEQ ID NO: 537

SEQ ID NO: 539 - protein, 195 aa, Homo sapiens [sequence omitted]

SEQ ID NO: 540 - protein, 68 aa, Homo sapiens
  SITE (14): Xaa equals any of the naturally occurring L-amino acids
WPTVASPRTASRPXGPCQNCACWTTSGAGCRPGQTSMPPWTTGPRCCTSQPPTGSARRLPCCWNTEPA

SEQ ID NO: 541 - protein, 201 aa, Homo sapiens
RQAVIVCRRRFVMGPVRLGILLFLFLAVHEAWAGMLKEEDDDTERLPSKCEVCKLLSTELQAELSRTGRSREVLELGQVLDTGKRKRHVPYSVSETRLEEALENLCERILDYSVHAERKGSLRYAKGQSQTMATLKGLVQKGVKVDLGIPLELWDEPSVEVTYLKKQCETMLEEEEEEEEEEGGDKMTKTGSHPKLDREDL

SEQ ID NO: 542 - protein, 15 aa, Homo sapiens
MPPRAAWAWLLCGAS

SEQ ID NO: 543 - protein, 15 aa, Homo sapiens
MPPRAAWAWLLCGAS

SEQ ID NO: 544 - protein, 116 aa, Homo sapiens
  SITE (7): Xaa equals any of the naturally occurring L-amino acids
  SITE (16): Xaa equals any of the naturally occurring L-amino acids
SQLLRRXRQEDCLSPXGGSCSEPRLRHCTPAWVTERDSVSKKKKKTSEVGAVPYFCPTPIKRIPKTTCGNLIILSNLLFGQDWHLPCFSLLLAVKHGFKEECFSEFTLYISDLEVI

SEQ ID NO: 545 - protein, 51 aa, Homo sapiens [sequence omitted]

SEQ ID NO: 546 - protein, 51 aa, Homo sapiens [sequence omitted]

SEQ ID NO: 547 - protein, 69 aa, Homo sapiens
MAAARNLRTALIFGGFISMVGAAFYPIYFRPLMRLEEYQKEQAVNRAGIVQEDVQPPGLKVWSDPFGRK

SEQ ID NO: 548 - protein, 69 aa, Homo sapiens; identical to SEQ ID NO: 547

SEQ ID NO: 549 - protein, 79 aa, Homo sapiens
SGWQVPSSVKHLPYDNLRSHCVADEGETEVEGTRATWVEHSGRPGVGSGRPPGTSLTTLPLLLTHLSLTCPLGGDFSKR

SEQ ID NO: 550 - protein, 89 aa, Homo sapiens
MPVPLLASAAWCHLCAGALPAWLWLPWRAAAAQWHVCASHCLPLHPAFSALGPHPDPGRAGPGAAPRDCAHPELHPLCLPRWSLQLLPR

SEQ ID NO: 551 - protein, 21 aa, Homo sapiens
PWASSHLGPRPYVHGLAPSGP

SEQ ID NO: 552 - protein, 6 aa, Homo sapiens
PWPPLV

SEQ ID NO: 553 - protein, 6 aa, Homo sapiens
PWPPLV

SEQ ID NO: 554 - protein, 52 aa, Homo sapiens
DILNLYCTFYLRGSSFTCVFICVYLSYSKRSRESPCPRSSILRSEDVQNSSR

SEQ ID NO: 555 - protein, 39 aa, Homo sapiens [sequence omitted]

SEQ ID NO: 556 - protein, 12 aa, Homo sapiens
GGNVLIFHFRCL

SEQ ID NO: 557 - protein, 70 aa, Homo sapiens
MSHCTWPLDYSFLFMSCASICGQHGASVGNTGRKQVQIWLGLLAWQLGKPPLLWLLPRLFMTVAAHQLQL

SEQ ID NO: 558 - protein, 70 aa, Homo sapiens; identical to SEQ ID NO: 557

SEQ ID NO: 559 - protein, 62 aa, Homo sapiens
VYQRKSTVVLGGFLLWDIDFLFFFRNIVCCNLNKNYDILRYFIDKPNKNICFYFKVNVFLFS

SEQ ID NO: 560 - protein, 47 aa, Homo sapiens
MLRFSSSLLECLLSPLCLTDATGHHLDHPILVPVQVQKRNNVLKFTS

SEQ ID NO: 561 - protein, 49 aa, Homo sapiens [sequence omitted]

SEQ ID NO: 562 - protein, 49 aa, Homo sapiens [sequence omitted]

SEQ ID NO: 563 - protein, 47 aa, Homo sapiens
  SITE (25): Xaa equals any of the naturally occurring L-amino acids
MLIFSFLSFWFFQSCQGFIYFMSIXEEPVADFVHLYCVFYFQGCSYL

SEQ ID NO: 564 - protein, 128 aa, Homo sapiens
FSNTWSFPKDAFYTDFYLKSIVVREYCVFCSNPLKYIETCLICKYRFSYFSICDWKNINLTIWGYSIHTIHTNIYVFSVLQNFYIFPGICLLASLITERCTILSCTFFCCSLIFLSYPYGNCIKCIPI

SEQ ID NO: 565 - protein, 47 aa, Homo sapiens
MLIFSFLSFWFFQSCQGFIYFMSIFEEPVADFVHLYCVFYFQGCSYL

SEQ ID NO: 566 - protein, 34 aa, Homo sapiens
PCSWLRAVTLCQNLHWACTSCHCNCPCQCPQLLF

SEQ ID NO: 567 - protein, 193 aa, Homo sapiens [sequence omitted]

SEQ ID NO: 568 - protein, 138 aa, Homo sapiens
MCLLFLLPRFPVSWRAGVDGAAPSSQDLWRIRSPCGDCEGFDVHIMDDMIKVGRATLCIVPPTCSCIAGLSQGPSLGSTGSSVGGSEVRCCHFVWFNMSIAWYQPCSWLRAVTLCQNLHWACTSCHCNCPCQCPQLLF

SEQ ID NO: 569 - protein, 48 aa, Homo sapiens [sequence omitted]

SEQ ID NO: 570 - protein, 17 aa, Homo sapiens
FLSLLFFFLAFSFFTEA

SEQ ID NO: 571 - protein, 48 aa, Homo sapiens [sequence omitted]

SEQ ID NO: 572 - protein, 184 aa, Homo sapiens
  SITE (153): Xaa equals any of the naturally occurring L-amino acids
  SITE (178): Xaa equals any of the naturally occurring L-amino acids
  SITE (181): Xaa equals any of the naturally occurring L-amino acids
  SITE (182): Xaa equals any of the naturally occurring L-amino acids
VRMKYLFFSWLVVFVGSWIIYVQYSTYTELCRGKDCKKIICDKYKTGVIDGPACNSLCVTETLYFGKCLSTKPNNQMYLGIWDNLPGVVKCQMEQALHLDFGTELEPRKEIVLFDKPTRGTTVQKFKEMVYSLFKAKLGDQGNLSELVNLILXVADGDKDGQVSLGEAKSAWALLQLXEFXXHG

SEQ ID NO: 573 - protein, 3 aa, Homo sapiens
YTV

SEQ ID NO: 574 - protein, 403 aa, Homo sapiens
MKYLFFSWLVVFVGSWIIYVQYSTYTELCRGKDCKKIICDKYKTGVIDGPACNSLCVTETLYFGKCLSTKPNNQMYLGIWDNLPGVVKCQMEQALHLDFGTELEPRKEIVLFDKPTRGTTVQKFKEMVYSLFKAKLGDQGNLSELVNLILTVADGDKDGQVSLGEAKSAWALLQLNEFLLMVILQDKEHTPKLMGFCGDLYVMESVEYTSLYGISLPWVIELFIPSGFRRSMDQLFTPSWPRKAKIAIGLLEFVEDVFHGPYGNFLMCDTSAKNLGYNDKYDLKMVDMRKIVPETNLKELIKDRHCESDLDCVYGTDCRTSCDQSTMKCTSEVIQPNLAKACQLLKDYLLRGAPSEIREELEKQLYSCIALKVTANQMEMEHSLILNNLKTLLWKKISYTNDS

SEQ ID NO: 575 - protein, 60 aa, Homo sapiens
MSRFSQNFRGKEDHIVFLFCFNEIFFLLLMLLVFPWLLSKAVSGFAERLEMTTIFRVSRS

SEQ ID NO: 576 - protein, 60 aa, Homo sapiens; identical to SEQ ID NO: 575

SEQ ID NO: 577 - protein, 127 aa, Homo sapiens [sequence omitted]

SEQ ID NO: 578 - protein, 9 aa, Homo sapiens
LGKPWRYPT

SEQ ID NO: 579 - protein, 127 aa, Homo sapiens [sequence omitted]

SEQ ID NO: 580 - protein, 61 aa, Homo sapiens
MKSALHRDICILMLTAALFTIAKTEKQHKCPSIDEQINNLQYICTMEYHSALQKEMLLYLQ

SEQ ID NO: 581 - protein, 61 aa, Homo sapiens; identical to SEQ ID NO: 580

SEQ ID NO: 582 - protein, 61 aa, Homo sapiens; identical to SEQ ID NO: 580

SEQ ID NO: 583 - protein, 41 aa, Homo sapiens
MLVSMCMGLLFLQVGKQCIAFFYTESTRRPKHLKTMGSGYA

SEQ ID NO: 584 - protein, 41 aa, Homo sapiens; identical to SEQ ID NO: 583

SEQ ID NO: 585 - protein, 241 aa, Homo sapiens
  SITE (58): Xaa equals any of the naturally occurring L-amino acids
MFKLRQMRVEKFIYENHPDVFSDSSMDHFQKFLPTVGGQLGTAGQGFSYSKSNGRGGXQAGGSGSAGQYGSDQQHHLGSGSGAGGTGGPAGQAGRGGAAGTAGVGETGSGDQAGGEGKHITVFKTYISPWERAMGVDPQQKMELGIDLLAYGAKAELPKYKSFNRTAMPYGGYEKASKRMTFQMPKFDLGPLLSEPLVLYNQNLSNRPSFNRTPIPWLSSGEPVDYNVDIGIPLDGETEEL

SEQ ID NO: 586 - protein, 241 aa, Homo sapiens [sequence omitted]

SEQ ID NO: 587 - protein, 17 aa, Homo sapiens
RFPISPHPYQHAFLFFF

SEQ ID NO: 588 - protein, 39 aa, Homo sapiens
LRVAVGLCPRDALLLSPPRVVVCGVTDVVVDKGVGLLVV

SEQ ID NO: 589 - protein, 23 aa, Homo sapiens
  SITE (5): Xaa equals any of the naturally occurring L-amino acids
MRVTXSSHPCQRLVLQCSGFWLF

SEQ ID NO: 590 - protein, 27 aa, Homo sapiens
MRVTVSSHPCQRLVLSVFWLLAILIGV

SEQ ID NO: 591 - protein, 55 aa, Homo sapiens
MESSTGKASPRCHIHCVPPFPPPCPVKRVGRLFLFFQHFPQGTVIIPLMPSPPLD

SEQ ID NO: 592 - protein, 314 aa, Homo sapiens
  SITE (129): Xaa equals any of the naturally occurring L-amino acids
YSKTHSIKSAQPGVPTSARSPRQPSPGPTPPPFPGNRGTALGGGSIRQSPLSSSSPFSNRPPLPPTPSRALDDKPPPPPPPVGNRPSIHREAVPPPPPQNNKPPVPSTPRPSAASQAPPPPPPPSRPGXPPLPPSSSGNDETPRLPQRNLSLSSSTPPLPSPGRSGPLPPPPSERPPPPVRDPPGRSGPLPPPPPVSRNGSTSRALPATPQLPSRSGVDSPRSGPRPPLPPDRPSAGAPPPPPPSTSIRNGFQDSPCEDEWESRFYFHPISDLPPPEPYVQTTKSYPSKLARNESRSGSNRRERGAPPLPPIPR

SEQ ID NO: 593 - protein, 55 aa, Homo sapiens; identical to SEQ ID NO: 591

SEQ ID NO: 594 - protein, 53 aa, Homo sapiens
  SITE (23): Xaa equals any of the naturally occurring L-amino acids
FIIHSISPVALNPQAHDLPFSLXSCVSVFNLRSFPTMDSCTTLNETSIFQRRV

SEQ ID NO: 595 - protein, 261 aa, Homo sapiens
GIFRSLRVLFPLFSVGRPQFARSLSAAPQLSDTADTMGFGDLKSPAGLQVLNDYLADKSYIEGYVPSQADVAVFEAVSSPPPADLCHALRWYNHIKSYEKEKASLPGVKKALGKYGPADVEDTTGSGATDSKDDDDIDLFGSDDEEESEEAKRLREERLAQYESKKAKKPALVAKSSILLDVKPWDDETDMAKLEECVRSIQADGLVWGSSKLVPVGYGIKKLQIQCVVEDDKVGTDMLEEQITAFEDYVQSMDVAAFNKI

SEQ ID NO: 596 - protein, 44 aa, Homo sapiens
MKKEMVLLTTTYFSLHVKVFFCLFVCFSILSSSRRGSLANNSSW

SEQ ID NO: 597 - protein, 44 aa, Homo sapiens; identical to SEQ ID NO: 596

SEQ ID NO: 598 - protein, 42 aa, Homo sapiens
MFTLLLSSFFLQHCLQNNLYASEREQIFSNFLQLSSLKRRIC

SEQ ID NO: 599 - protein, 6 aa, Homo sapiens
LLLSSF

SEQ ID NO: 600 - protein, 42 aa, Homo sapiens; identical to SEQ ID NO: 598

SEQ ID NO: 601 - protein, 86 aa, Homo sapiens
  SITE (6): Xaa equals any of the naturally occurring L-amino acids
  SITE (21): Xaa equals any of the naturally occurring L-amino acids
  SITE (31): Xaa equals any of the naturally occurring L-amino acids
  SITE (76): Xaa equals any of the naturally occurring L-amino acids
LGSPEXAQKVDITSAHFIGQXSRPSDFAQVXSLEGSRPVIWSLNGWTLKETPRADGVFTETAGQGLGTAQGHLLWXAAATGSPDCS

SEQ ID NO: 602 - protein, 44 aa, Homo sapiens
MGVALPSPLLCSLPLFLLFGDVSGSSSLLALLPFLHPWHHPSLS

SEQ ID NO: 603 - protein, 44 aa, Homo sapiens; identical to SEQ ID NO: 602

SEQ ID NO: 604 - protein, 60 aa, Homo sapiens [sequence omitted]

SEQ ID NO: 605 - protein, 17 aa, Homo sapiens
ITFSCFFCNNCSQVNLQ

SEQ ID NO: 606 - protein, 60 aa, Homo sapiens [sequence omitted]

SEQ ID NO: 607 - protein, 97 aa, Homo sapiens
  SITE (87): Xaa equals any of the naturally occurring L-amino acids
  SITE (92): Xaa equals any of the naturally occurring L-amino acids
LGAEHFKCITWVAGWAVPGLKGVGSFFQGAPSASWHRTLAPAHPKLTLVGVGPLTQTWPLPSLVLLPQLSPVCGRVCLDRLWAGQGXGQAEXEFVLG

SEQ ID NO: 608 - protein, 318 aa, Homo sapiens
MRLLAGWLCLSLASVWLARRMWTLRSPLTRSLYVNMTSGPGGPAAAAGGRKENHQWYVCNREKLCESLQAVFVQSYLDQGTQIFLNNSIEKSGWLFIQLYHSFVSSVFSLFMSRTSINGLLGRGSMFVFSPDQFQRLLKINPDWKTHRLLDLGAGDGEVTKIMSPHFEEIYATELSETMIWQLQKKKYRVLGINEWQNTGFQYDVISCLNLLDRCDQPLTLLKDIRSVLEPTRGRVILALVLPFHPYVENVGGKWEKPSEILEIKGQNWEEQVNSLPEVFRKAGFVIEAFTRLPYLCEGDMYNDYYVLDDAVFVLKPV

SEQ ID NO: 609 - protein, 318 aa, Homo sapiens
MRLLAGWLCLSLASVWLARRMWTLRSPLTRSLYVNMTSGPGGPAAAAGGRKENHQWYVCNREKLCESLQAVFVQSYLDQGTQIFLNNSIEKSGWLFIQLYHSFVSSVFSLFMSRTSINGLLGRGSMFVFSPDQFQRLLKINPDWKTHRLLDLGAGDGEVTKIMSPHFEEIYATELSETMIWQLQKKKYRVLGINEWQNTGFQYDVISCLNLLDRCDQPLTLLKDIRSVLEPTRGRVILALVLPFHPYVENVGGKWEKPSEILEIKGQNWEEQVNSLPEVFRKAGFVIEAFTRLPYLCEGDMYNAYYVLDDAVFVLKPV

SEQ ID NO: 610 - protein, 195 aa, Homo sapiens
  SITE (159): Xaa equals any of the naturally occurring L-amino acids
  SITE (175): Xaa equals any of the naturally occurring L-amino acids
MWTLFALSGPLFLFQVLTFMIYIVSTVFCGHLGKVELASVTLAVAFVNVCGVSVGVGLSSACDTLMSQSFGSPNKKHVGVILQRGALVLLLCCLPCWALFLNTQHILLLFRQDPDVSRLTQDYVMIFIPGLPVIFLYNLLAKYLQNQVQVFSVWGGPSXSTLPYSSGRGAWGFPXLSTICEPALERGSLPTHLPY

SEQ ID NO: 611 - protein, 37 aa, Homo sapiens
LAGPVFIYFRRSPGPKSSVVWWATVSTVWPTMPWFLC

SEQ ID NO: 612 - protein, 3 aa, Homo sapiens
IPG

SEQ ID NO: 613 - protein, 180 aa, Homo sapiens
MWTLFALSGPLFLFQVLTFMIYIVSTVFCGHLGKVELASVTLAVAFVNVCGVSVGVGLSSACDTLMSQSFGSPNKKHVGVILQRGALVLLLCCLPCWALFLNTQHILLLFRQDPDVSRLTQDYVMIFIPGLPVIFLYNLLAKYLQNQVQVFECVGRPFSQHTALFQWEGGLGLSPSLHHL

SEQ ID NO: 614 - protein, 38 aa, Homo sapiens
EKKKKKKKRPGAVAHALIPALWETEAGGSPEVGSSRPA

SEQ ID NO: 615 - protein, 18 aa, Homo sapiens
MVRTLSLAVLSWLPAAVC

SEQ ID NO: 616 - protein, 18 aa, Homo sapiens
MVRTLSLAVLSWLPAAVC

SEQ ID NO: 617 - protein, 42 aa, Homo sapiens
MLLSWTVLIIILPFAGDVSSHLCILRPFAGSVSSCLSNFKRI

SEQ ID NO: 618 - protein, 42 aa, Homo sapiens; identical to SEQ ID NO: 617

SEQ ID NO: 619 - protein, 93 aa, Homo sapiens [sequence omitted]

SEQ ID NO: 620 - protein, 403 aa, Homo sapiens
  SITE (175): Xaa equals any of the naturally occurring L-amino acids
  SITE (320): Xaa equals any of the naturally occurring L-amino acids
  SITE (331): Xaa equals any of the naturally occurring L-amino acids
  SITE (368): Xaa equals any of the naturally occurring L-amino acids
MATAERRALGIGFQWLSLATLVLICAGQGGRREDGGPACYGGFDLYFILDKSGSVLHHWNEIYYFVEQLAHKFISPQLRMSFIVFSTRGTTLMKLTEDREQIRQGLEELQKVLPGGDTYMHEGFERASEQIYYENRQGYRTASVIIALTDGELHEDLFFYSEREANRSRDLGAIXYCVGVKDFNETQLARIADSKDHVFPVNDGFQALQGIIHSILKKSCIEILAAEPSTICAGESFQVVVRGNGFRHARNVDRVLCSFKINDSVTLNEKPFSVEDTYLLCPAPILKEVGMKAALQVSMNDGLSFISSSVIITTTHCSDXSILAIALLILXLLLALALLWWFWPLCCTVIIKEVPPPPAEESEVSDHXRMAVGGQGGRVGWRAGWAAGHLAPCRAELSQAQRI

SEQ ID NO: 621 - protein, 403 aa, Homo sapiens
MATAERRALGIGFQWLSLATLVLICAGQGGRREDGGPACYGGFDLYFILDKSGSVLHHWNEIYYFVEQLAHKFISPQLRMSFIVFSTRGTTLMKLTEDREQIRQGLEELQKVLPGGDTYMHEGFERASEQIYYENRQGYRTASVIIALTDGELHEDLFFYSEREANRSRDLGAIVYCVGVKDFNETQLARIADSKDHVFPVNDGFQALQGIIHSILKKSCIEILAAEPSTICAGESFQVVVRGNGFRHARNVDRVLCSFKINDSVTLNEKPFSVEDTYLLCPAPILKEVGMKAALQVSMNDGLSFISSSVIITTTHCSDGSILAIALLILFLLLALALLWWFWPLCCTVIIKEVPPPPAEESEVSDHSRMAVGGQGGRVGWRAGWAAGHLAPCRAELSQAQRI

SEQ ID NO: 622 - protein, 156 aa, Homo sapiens
  SITE (102): Xaa equals any of the naturally occurring L-amino acids
VVKITHCPTLLTRDGDRIRSNGKFGGLQNKAPPMDKLRGMVFGAPVPKQCLILGEQIDLLQQYRSAVCKLDSVNKDLNSQLEYLRTPDMRKKKQELDEHEKXLKLIEEKLGMTPIRKCNDSLRHSPKVETTDCPVPPKRMRREATRQNRIITKTDV

SEQ ID NO: 623 - protein, 175 aa, Homo sapiens
  SITE (91): Xaa equals any of the naturally occurring L-amino acids
  SITE (173): Xaa equals any of the naturally occurring L-amino acids
  SITE (174): Xaa equals any of the naturally occurring L-amino acids
  SITE (175): Xaa equals any of the naturally occurring L-amino acids
VFGMLLGDTIILDNLDAANHYRKEVVKITHCPTLLTRDGDRIRSNGKFGGLQNKAPPMDKLRGMVFGAPVPKQCLILGEQIDLLQQYRSAXCKLDSVNKDLNSQLEYLRTPDMRKKKQELDEHEKNLKLIEEKLGMTPIRKCNDSLRHSPKVETTDCPVPPKRMRREAGDKRXXX

SEQ ID NO: 624 - protein, 24 aa, Homo sapiens
MWHLWRRLLSCFPVAMLQDYKYSV

SEQ ID NO: 625 - protein, 20 aa, Homo sapiens
SCLPVGTDPQQMQKHLVVIK

SEQ ID NO: 626 - protein, 24 aa, Homo sapiens
MWHLWRRLLSCFPVAMLQDYKYSV

SEQ ID NO: 627 - protein, 439 aa, Homo sapiens
  SITE (358): Xaa equals any of the naturally occurring L-amino acids
MVPSSPRALFLLLLILACPEPRASQNCLSKQQLLSAIRQLQQLLKGQETRFAEGIRHMKSRLAALQNSVGRVGPDALPVSCPALNTPADGRKFGSKYLVDHEVHFTCNPGFRLVGPSSVVCLPNGTWTGEQPHCRGISECSSQPCQNGGTCVEGVNQYRCICPPGRTGNRCQHQAQTAAPEGSVAGDSAFSRAPRCAQVERAQHCSCEAGFHLSGAAGDSVCQDVNECELYGQEGRPRLCMHACVNTPGSYRCTCPGGYRTLADGKSCEDVDECVGLQPVCPQGTTCINTGGSFQCVSPECPEGSGNVSYVKTSPFQCERNPCPMDSRPCRHLPKTISFHYLSLPSNLKTPITLFRMXTASAPGRAGPNSLRFGIVGGNSRGHFVMQRSDRQTGDLILVQNLEGPQTLEVDVDMSEYLDRSFQANHVSKVTIFVSPYDF

SEQ ID NO: 628 - protein, 439 aa, Homo sapiens
MVPSSPRALFLLLLILACPEPRASQNCLSKQQLLSAIRQLQQLLKGQETRFAEGIRHMKSRLAALQNSVGRVGPDALPVSCPALNTPADGRKFGSKYLVDHEVHFTCNPGFRLVGPSSVVCLPNGTWTGEQPHCRGISECSSQPCQNGGTCVEGVNQYRCICPPGRTGNRCQHQAQTAAPEGSVAGDSAFSRAPRCAQVERAQHCSCEAGFHLSGAAGDSVCQDVNECELYGQEGRPRLCMHACVNTPGSYRCTCPGGYRTLADGKSCEDVDECVGLQPVCPQGTTCINTGGSFQCVSPECPEGSGNVSYVKTSPFQCERNPCPMDSRPCRHLPKTISFHYLSLPSNLKTPITLFRMATASAPGRAGPNSLRFGIVGGNSRGHFVMQRSDRQTGDLILVQNLEGPQTLEVDVDMSEYLDRSFQANHVSKVTIFVSPYDF

SEQ ID NO: 629 - protein, 32 aa, Homo sapiens
WNPISMKNKLKILKIKKKKKKKKKKKKKKGRP

SEQ ID NO: 630 - protein, 15 aa, Homo sapiens
PAPLPLRWSPAGPGQ

SEQ ID NO: 631 - protein, 44 aa, Homo sapiens
MAPACQILRWALALGLGLMFEVTHAFRSQGRGSLVVAVGRERKM

SEQ ID NO: 632 - protein, 44 aa, Homo sapiens; identical to SEQ ID NO: 631

SEQ ID NO: 633 - protein, 42 aa, Homo sapiens
MFKKDLICKRWSFFFWGLLISVVILTSFSNYSRRFYLDLYFS

SEQ ID NO: 634 - protein, 7 aa, Homo sapiens
FIGFILC

SEQ ID NO: 635 - protein, 42 aa, Homo sapiens; identical to SEQ ID NO: 633

SEQ ID NO: 636 - protein, 93 aa, Homo sapiens
  SITE (13): Xaa equals any of the naturally occurring L-amino acids
  SITE (39): Xaa equals any of the naturally occurring L-amino acids
WFQTVDRHCFVLXTDKVKLTWRDRFPAYLTNLVSIIFMXSSRRLRPDEVRGNRKEVIGFSRAWWFTTVIPALWEAEAGRSLEVRSSRPAWPIW

SEQ ID NO: 637 - protein, 35 aa, Homo sapiens [sequence omitted]

SEQ ID NO: 638 - protein, 35 aa, Homo sapiens [sequence omitted]

SEQ ID NO: 639 - protein, 394 aa, Homo sapiens [sequence omitted]

SEQ ID NO: 640 - protein, 49 aa, Homo sapiens
MSPRPLIARCEALGCGARRLPWWALAMALCACGRCVAANSIGETLPSEV

SEQ ID NO: 641 - protein, 49 aa, Homo sapiens; identical to SEQ ID NO: 640

SEQ ID NO: 642 - protein, 85 aa, Homo sapiens
PSVALCWIFFIPLGKWEFFYRPAILLLCQIALYYQDTPMAHFRLTELFLYECTVVIFWAVCEFLVTHPLTTKALSEQYKSIKAQI

SEQ ID NO: 643 - protein, 85 aa, Homo sapiens
  SITE (8): Xaa equals any of the naturally occurring L-amino acids
  SITE (33): Xaa equals any of the naturally occurring L-amino acids
MVGLPAVXQLFWGLCLCTCGLYPAPQSWLSSGXYKVTSGAPSERMWPQRHASGFRLSGRTCLRATAPSPSFPFFSAVINLSACSK

SEQ ID NO: 644 - protein, 54 aa, Homo sapiens
MVGLPAVVQLFWGLCLCTCGAVSCPTELAVQWRIQSDIWCSLRKNVAPEACQWL

SEQ ID NO: 645 - protein, 81 aa, Homo sapiens
  SITE (67): Xaa equals any of the naturally occurring L-amino acids
  SITE (76): Xaa equals any of the naturally occurring L-amino acids
  SITE (81): Xaa equals any of the naturally occurring L-amino acids
MILGIHWGIFLLLLLSWLELQRTVIFFFSPFPIQKHYTLGHFSFSQRRFMDSQTELCATGKVKREKXADEVTWLHXLHHAX

SEQ ID NO: 646 - protein, 73 aa, Homo sapiens
IFLLLLLSWLELQRTVIFFFSPFPIQKHYTLGHFSFSQRRFMDSQTELCATGKVKREKAADEVTWLHVLHHAE

SEQ ID NO: 647 - protein, 9 aa, Homo sapiens
WGLLYLELN

SEQ ID NO: 648 - protein, 81 aa, Homo sapiens
MILGIHWGIFLLLLLSWLELQRTVIFFFSPFPIQKHYTLGHFSFSQRRFMDSQTELCATGKVKREKAADEVTWLHVLHHAE

SEQ ID NO: 649 - protein, 870 aa, Homo sapiens
  SITE (534): Xaa equals any of the naturally occurring L-amino acids
MGPPSLVLCLLSATVFSLLGGSSAFLSHHRLKGRFQRDRRNIRPNIILVLTDDQDVELGSMQVMNKTRRIMEQGGAHFINAFVTTPMCCPSRSSILTGKYVHNHNTYTNNENCSSPSWQAQHESRTFAVYLNSTGYRTAFFGKYLNEYNGSYVPPGWKEWVGLLKNSRFYNYTLCRNGVKEKHGSDYSKDYLTDLITNDSVSFFRTSKKMYPHRPVLMVISHAAPHGPEDSAPQYSRLFPNASQHITPSYNYAPNPDKHWIMRYTGPMKPIHMEFTNMLQRKRLQTLMSVDDSMETIYNMLVETGELDNTYIVYTADHGYHIGQFGLVKGKSMPYEFDIRVPFYVRGPNVEAGCLNPHIVLNIDLAPTILDIAGLDIPADMDGKSILKLLDTERPVNRFHLKKKMRVWRDSFLVERGKLLHKRDNDKVDAQEENFLPKYQRVKDLCQRAEYQTACEQLGQKWQCVEDATGKLKLHKCKGPMRLGGSRALSNLVPKYYGQGSEACTCDSGDYKLSLAGRRKKLFKKKYKASYVRXRSIRSVAIEVDGRVYHVGLGDAAQPRNLTKRHWPGAPEDQDDKDGGDFSGTGGLPDYSAANPIKVTHRCYILENDTVQCDLDLYKSLQAWKDHKLHIDHEIETLQNKIKNLREVRGHLKKKRPEECDCHKISYHTQHKGRLKHRGSSLHPFRKGLQEKDKVWLLREQKRKKKLRKLLKRLQNNDTCSMPGLTCFTHDNQHWQTAPFWTLGPFCACTSANNNTYWCMRTINETHNFLFCEFATGFLEYFDLNTDPYQLMNAVNTLDRDVLNQLHVQLMELRSCKGYKQCNPRTRNMDLGLKDGGSYEQYRQFQRRKWPEMKRPSSKSLGQLWEGWEG

SEQ ID NO: 650 - protein, 870 aa, Homo sapiens
MGPPSLVLCLLSATVFSLLGGSSAFLSHHRLKGRFQRDRRNIRPNIILVLTDDQDVELGSMQVMNKTRRIMEQGGAHFINAFVTTPMCCPSRSSILTGKYVHNHNTYTNNENCSSPSWQAQHESRTFAVYLNSTGYRTAFFGKYLNEYNGSYVPPGWKEWVGLLKNSRFYNYTLCRNGVKEKHGSDYSKDYLTDLITNDSVSFFRTSKKMYPHRPVLMVISHAAPHGPEDSAPQYSRLFPNASQHITPSYNYAPNPDKHWIMRYTGPMKPIHMEFTNMLQRKRLQTLMSVDDSMETIYNMLVETGELDNTYIVYTADHGYHIGQFGLVKGKSMPYEFDIRVPFYVRGPNVEAGCLNPHIVLNIDLAPTILDIAGLDIPADMDGKSILKLLDTERPVNRFHLKKKMRVWRDSFLVERGKLLHKRDNDKVDAQEENFLPKYQRVKDLCQRAEYQTACEQLGQKWQCVEDATGKLKLHKCKGPMRLGGSRALSNLVPKYYGQGSEACTCDSGDYKLSLAGRRKKLFKKKYKASYVRSRSIRSVAIEVDGRVYHVGLGDAAQPRNLTKRHWPGAPEDQDDKDGGDFSGTGGLPDYSAANPIKVTHRCYILENDTVQCDLDLYKSLQAWKDHKLHIDHEIETLQNKIKNLREVRGHLKKKRPEECDCHKISYHTQHKGRLKHRGSSLHPFRKGLQEKDKVWLLREQKRKKKLRKLLKRLQNNDTCSMPGLTCFTHDNQHWQTAPFWTLGPFCACTSANNNTYWCMRTINETHNFLFCEFATGFLEYFDLNTDPYQLMNAVNTLDRDVLNQLHVQLMELRSCKGYKQCNPRTRNMDLGLKDGGSYEQYRQFQRRKWPEMKRPSSKSLGQLWEGWEG

SEQ ID NO: 651 - protein, 204 aa, Homo sapiens
MMPLLSLIFSALFILFGTVIVQAFSDSNDERESSPPEKEEAQEKTGKTEPSFTKENSSKIPKKGFVEVTELTDVTYTSNLVRLRPGHMNVVLILSNSTKTSLLQKFALEVYTFTGSSCLHFSFLSLDKHREWLEYLLEFAQDAAPIPNQYDKHFMERDYTGYVLALNGHKKYFCLFKPQKTVEEEEAIGSCSDVDSSLYLGESR

SEQ ID NO: 652 - protein, 332 aa, Homo sapiens
  SITE (204): Xaa equals any of the naturally occurring L-amino acids
  SITE (283): Xaa equals any of the naturally occurring L-amino acids
  SITE (305): Xaa equals any of the naturally occurring L-amino acids
MEVRKLSISWQFLIVLVLILQILSALDFDPYRVLGVSRTASQADIKKAYKKLAREWHPDKNKDPGAEDKFIQISKAYEILSNEEKRSNYDQYGDAGENQGYQKQQQQREYRFRHFHENFYFDESFFHFPFNSERRDSIDEKYLLHFSHYVNEVVPDSFKKPYLIKITSDWCFSCIHIEPVWKEVIQELEELGVGIGVVHAGYEXRLAHHLGAHSTPSILGIINGKISFFHNAVVRENLRQFVESLLPGNLVEKVTNKNYVRFLSGWQQENKPHVLLFDQTPIXPLLYKLTAFAYKDYLSFGYVYXGLRGTEEMTRRYNINIYAPTLLALKNI

SEQ ID NO: 653 - protein, 737 aa, Homo sapiens
MEVRKLSISWQFLIVLVLILQILSALDFDPYRVLGVSRTASQADIKKAYKKLAREWHPDKNKDPGAEDKFIQISKAYEILSNEEKRSNYDQYGDAGENQGYQKQQQQREYRFRHFHENFYFDESFFHFPFNSERRDSIDEKYLLHFSHYVNEVVPDSFKKPYLIKITSDWCFSCIHIEPVWKEVIQELEELGVGIGVVHAGYERRLAHHLGAHSTPSILGIINGKISFFHNAVVRENLRQFVESLLPGNLVEKVTNKNYVRFLSGWQQENKPHVLLFDQTPIVPLLYKLTAFAYKDYLSFGYVYVGLRGTEEMTRRYNINIYAPTLLVFKEHINRPADVIQARGMKKQIIDDFITRNKYLLAARLTSQKLFHELCPVKRSHRQRKYCVVLLTAETTKLSKPFEAFLSFALANTQDTVRFVHVYSNRQQEFADTLLPDSEAFQGKSAVSILERRNTAGRVVYKTLEDPWIGSESDKFILLGYLDQLRKDPALLSSEAVLPDLTDELAPVFLLRWFYSASDYISDCWDSIFHNNWREMMPLLSLIFSALFILFGTVIVQAFSDSNDERESSPPEKEEAQEKTGKTEPSFTKENSSKIPKKGFVEVTELTDVTYTSNLVRLRPGHMNVVLILSNSTKTSLLQKFALEVYTFTGSSCLHFSFLSLDKHREWLEYLLEFAQDAAPIPNQYDKHFMERDYTGYVLALNGHKKYFCLFKPQKTVEEEEAIGSCSDVDSSLYLGE

SEQ ID NO: 654 - protein, 42 aa, Homo sapiens
MNSSFFISLPALIWSVCLILGWWQVSSGKVAHCGFIFCFPNN

SEQ ID NO: 655 - protein, 111 aa, Homo sapiens
CGSHRMSWKMYCPLHFSGRVCEELKFFFSFFFFLRRSLTPAQATAGDSVSKKQREERKKEKKEGRRKEGRNEGTKEGRKRKEGRKKERERERKKERKKERKKEKKKKKTGT

SEQ ID NO: 656 - protein, 42 aa, Homo sapiens; identical to SEQ ID NO: 654

SEQ ID NO: 657 - protein, 128 aa, Homo sapiens
  SITE (67): Xaa equals any of the naturally occurring L-amino acids
  SITE (68): Xaa equals any of the naturally occurring L-amino acids
  SITE (70): Xaa equals any of the naturally occurring L-amino acids
  SITE (96): Xaa equals any of the naturally occurring L-amino acids
MPVFVCSIGLCFLFSILLLFPPFQFSYICWLSQASVYSPSPSLSNLEVLLCLSILLMIIFPFLISIXXIXSIGRLSTHMGAHTHTHTHTHTHTHTXVCYWPLLLISQENEPFRMFLPLHSALTQNFCS

SEQ ID NO: 658 - protein, 128 aa, Homo sapiens
MPVFVCSIGLCFLFSILLLFPPFQFSYICWLSQASVYSPSPSLSNLEVLLCLSILLMIIFPFLISIIHIFSIGRLSTHMGAHTHTHTHTHTHTHTQVCYWPLLLISQENEPFRMFLPLHSALTQNFCS

SEQ ID NO: 659 - protein, 24 aa, Homo sapiens
  SITE (9): Xaa equals any of the naturally occurring L-amino acids
  SITE (18): Xaa equals any of the naturally occurring L-amino acids
MSWRVWALXFFPAVCVCXCVCVYT

SEQ ID NO: 660 - protein, 65 aa, Homo sapiens
VLMRSDGFIRGFSPFCWALLLLPPREEGCVCFPFCHDCKFPVASPSLRNCESIKALFFIKKKKKN

SEQ ID NO: 661 - protein, 38 aa, Homo sapiens
MSWRVWALLFFPAVCVCVCVCVCACTRTRVCDETIKLV

SEQ ID NO: 662 - protein, 37 aa, Homo sapiens
MVESPVCGLLEGWFFLLFSLAFLSTHLFSEASPLSIL

SEQ ID NO: 663 - protein, 37 aa, Homo sapiens; identical to SEQ ID NO: 662

SEQ ID NO: 664 - protein, 58 aa, Homo sapiens
MTLSVLQHFFICVLLILLLDTNLCRQISSHSFEFSGNQPLVFCCISSISAKLVLDQAG

SEQ ID NO: 665 - protein, 2 aa, Homo sapiens
LE

SEQ ID NO: 666 - protein, 58 aa, Homo sapiens; identical to SEQ ID NO: 664

SEQ ID NO: 667 - protein, 124 aa, Homo sapiens
  SITE (89): Xaa equals any of the naturally occurring L-amino acids
  SITE (103): Xaa equals any of the naturally occurring L-amino acids
  SITE (104): Xaa equals any of the naturally occurring L-amino acids
  SITE (113): Xaa equals any of the naturally occurring L-amino acids
  SITE (121): Xaa equals any of the naturally occurring L-amino acids
VAQVQVPGGHIGLGYLARIDFHRRDGTGGIPARIDGGEIDVALLPGQAVDHIMARACGGEHLAEVGRGTVQGLLGRAVLAAQARRAPPXQPLPATMGFWGWKXXPNRGLWFKXWKPPFGAXGVP

SEQ ID NO: 668 - protein, 283 aa, Homo sapiens
  SITE (174): Xaa equals any of the naturally occurring L-amino acids
  SITE (189): Xaa equals any of the naturally occurring L-amino acids
  SITE (205): Xaa equals any of the naturally occurring L-amino acids
MKIVPLTAAVLALVLAPAAHAQPANKATTVSPTAAAFLAQFATEGNDSVSWAQFEAFRKQRYADTDRNQDGHVDEQEYVDEYLQRFDVRLADARAGHLRQTDTRFKALDRDGNGAISRAEYDAAGERTWAGYERSQNATQETAAASSRDPLKMPTSHTANGMLDLYDRNKDGAXDREEFDAVRAASFAXTDTDGNGTLSLAEYTXEFEGRLDQQRQRVRADAERQARVRFASLDKDTDGRMTFAEYQLSGKRMFDRADSNGDGVVDARDPEPVAGAHSANGNR

SEQ ID NO: 669 - protein, 283 aa, Homo sapiens
MKIVPLTAAVLALVLAPAAHAQPANKATTVSPTAAAFLAQFATEGNDSVSWAQFEAFRKQRYADTDRNQDGHVDEQEYVDEYLQRFDVRLADARAGHLRQTDTRFKALDRDGNGAISRAEYDAAGERTWAGYERSQNATQETAAASSRDPLKMPTSHTANGMLDLYDRNKDGAVDREEFDAVRAASFAATDTDGNGTLSLAEYTAEFEGRLDQQRQRVRADAERQARVRFASLDKDTDGRMTFAEYQLSGKRMFDRADSNGDGVVDARDPEPVAGAHSANGNR

SEQ ID NO: 670 - protein, 86 aa, Homo sapiens
  SITE (4): Xaa equals any of the naturally occurring L-amino acids
  SITE (11): Xaa equals any of the naturally occurring L-amino acids
NLWXAHFFLNXSSIQIEYPPLSKMLETPKGKGWFFGEFFFWVFLFFLGFAFGFWNSLFVLYLFVGHPKSEICSKIQNVKCSSEHFL

SEQ ID NO: 671 - protein, 57 aa, Homo sapiens
MGLLPGWLLLWARLKCFCAVGLGSLAAVYGRGPGLPQDQLDCVLWDCGTLGLYRGQF

SEQ ID NO: 672 - protein, 12 aa, Homo sapiens
  SITE (8): Xaa equals any of the naturally occurring L-amino acids
LFSGWLVXLCGV

SEQ ID NO: 673 - protein, 48 aa, Homo sapiens
  SITE (31): Xaa equals any of the naturally occurring L-amino acids
MGETLVSVFLKPPALTWLLRAICLMVQTWAXGQRSWPQSLALPCYLNR

SEQ ID NO: 674 - protein, 29 aa, Homo sapiens
  SITE (3): Xaa equals any of the naturally occurring L-amino acids
  SITE (13): Xaa equals any of the naturally occurring L-amino acids
  SITE (17): Xaa equals any of the naturally occurring L-amino acids
  SITE (19): Xaa equals any of the naturally occurring L-amino acids
  SITE (23): Xaa equals any of the naturally occurring L-amino acids
MLXSNSFSPSLSXYLCXLXFSLXSSKSSK

SEQ ID NO: 675 - protein, 29 aa, Homo sapiens [sequence omitted]

SEQ ID NO: 676 - protein, 57 aa, Homo sapiens
MPPHRQTDGQMGLPAPALWVWGLLLSSSFQTLLPAFPKPPALNLGCSTRPIPSFLKI

SEQ ID NO: 677 - protein, 93 aa, Homo sapiens
  SITE (24): Xaa equals any of the naturally occurring L-amino acids
  SITE (65): Xaa equals any of the naturally occurring L-amino acids
QVSLPTRLLQMPGMGLDSRFQAWXPSPYLGPQPRAPRPGLQPGPSLRGAEFRESCPRSQKRGREXGRPCPGCRPGGWGLPARLGQPQLQTGPG

SEQ ID NO: 678 - protein, 57 aa, Homo sapiens; identical to SEQ ID NO: 676

SEQ ID NO: 679 - protein, 25 aa, Homo sapiens
  SITE (13): Xaa equals any of the naturally occurring L-amino acids
MVGRCSILSSTPXRHPSLSWEGLGG

SEQ ID NO: 680 - protein, 25 aa, Homo sapiens
MVGRCSILSSTPQRHPSLSWEGLGG

SEQ ID NO: 681 - protein, 18 aa, Homo sapiens
  SITE (13): Xaa equals any of the naturally occurring L-amino acids
MGTQGCPHPSWLXLLGLS

SEQ ID NO: 682 - protein, 30 aa, Homo sapiens
MGTQGCPHPSWLLLLGLSWWGEGDGAVGPC

SEQ ID NO: 683 - protein, 10 aa, Homo sapiens
SLLELGLGPL

SEQ ID NO: 684 - protein, 206 aa, Homo sapiens
  SITE (2): Xaa equals any of the naturally occurring L-amino acids
  SITE (3): Xaa equals any of the naturally occurring L-amino acids
  SITE (41): Xaa equals any of the naturally occurring L-amino acids
DXXPGAYAGFRPNANRISFPVFRNNVCPWPEALRSAPKLLXLDEPMGALDKKLRDRMQLEVVDILERVGVTCVMVTHDQEEAMTMAGRIAIMNRGKFVQIGEPEEIYEHPTTRYSAEFIGSVNVFEGVLKERQEDGLVLDSPGLVHPLKVDADASVVDNVPVHVALRPEKIMLCEEPPANGCNFAVGEVIHIAYLGDLSVYHVRLK

SEQ ID NO: 685 - protein, 440 aa, Homo sapiens
  SITE (168): Xaa equals any of the naturally occurring L-amino acids
  SITE (169): Xaa equals any of the naturally occurring L-amino acids
  SITE (173): Xaa equals any of the naturally occurring L-amino acids
  SITE (180): Xaa equals any of the naturally occurring L-amino acids
  SITE (191): Xaa equals any of the naturally occurring L-amino acids
MASLVSLELGLLLAVLVVTATASPPAGLLSLLTSGQGALDQEALGGLLNTLADRVHCANGPCGKCLSVEDALGLGEPEGSGLPPGPVLEARYVARLSAAAVLYLSNPEGTCEDARAGLWASHADHLLALLESPKALTPGLSWLLQRMQARAAGQTPKTACVDIPQLLXXAVGXGAPGSAXGVLAALLDHVXSGSCFHALPSPQYFVDFVFQQHSSEVPMTLAELSALMQRLGVGREAHSDHSHRHRGASSRDPVPLISSSNSSSVWDTVCLSARDVMAAYGLSEQAGVTPEAWAQLSPALLQQQLSGACTSQSRPPVQDQLSQSERYLYGSLATLLICLCAVFGLLLLTCTGCRGVTHYILQTFLSLAVGALTGDAVLHLTPKVLGLHTHSEEGLSPQPTWRLLAMLAGLYAFFLFENLFNLLLPRDPEDLEDGPAATAA

SEQ ID NO: 686 - protein, 647 aa, Homo sapiens
MASLVSLELGLLLAVLVVTATASPPAGLLSLLTSGQGALDQEALGGLLNTLADRVHCANGPCGKCLSVEDALGLGEPEGSGLPPGPVLEARYVARLSAAAVLYLSNPEGTCEDARAGLWASHADHLLALLESPKALTPGLSWLLQRMQARAAGQTPKTACVDIPQLLEEAVGAGAPGSAGGVLAALLDHVRSGSCFHALPSPQYFVDFVFQQHSSEVPMTLAELSALMQRLGVGREAHSDHSHRHRGASSRDPVPLISSSNSSSVWDTVCLSARDVMAAYGLSEQAGVTPEAWAQLSPALLQQQLSGACTSQSRPPVQDQLSQSERYLYGSLATLLICLCAVFGLLLLTCTGCRGVTHYILQTFLSLAVGALTGDAVLHLTPKVLGLHTHSEEGLSPQPTWRLLAMLAGLYAFFLFENLFNLLLPRDPEDLEDGPCGHSSHSHGGHSHGVSLQLAPSELRQPKPPHEGSRADLVAEESPELLNPEPRRLSPELRLLPYMITLGDAVHNFADGLAVGAAFASSWKTGLATSLAVFCHELPHELGDFAALLHAGLSVRQALLLNLASALTAFAGLYVALAVGVSEESEAWILAVATGLFLYVALCDMLPAMLKVRDPRPWLLFLLHNVGLLGGWTVLLLLSLYEDDITF

SEQ ID NO: 687 - protein, 49 aa, Homo sapiens
  SITE (48): Xaa equals any of the naturally occurring L-amino acids
ISVIFNDTVKKTMQECSAMKQIFKDLFTGFLSWNIHLFPRCLCDSEIXP

SEQ ID NO: 688 - protein, 307 aa, Homo sapiens
  SITE (249): Xaa equals any of the naturally occurring L-amino acids
  SITE (261): Xaa equals any of the naturally occurring L-amino acids
MLRVVEGIFIFVVVSESVFGVLGNGFIGLVNCIDCAKNKLSTIGFILTGLAISRIFLIWIIITDGFIQIFSPNIYASGNLIEYISYFWVIGNQSSMWFATSLSIFYFLKIANFSNYIFLWLKSRTNMVLPFMIVFLLISSLLNFAYIAKILNDYKMKNDTVWDLNMYKSEYFIKQILLNLGVIFFFTLSLITCIFLIISLWRHNRQMQSNVTGLRDSNTEAHVKAMKVLISFIILFILYFIGMAIEISXFTVRENKLLLMXGMTTTAIYPWGHSFILILGNSKLKQASLRVLQQLKCCEKRKNLRVT

SEQ ID NO: 689 - protein, 181 aa, Homo sapiens
MVLPFMIVFLLISSLLNFAYIAKILNDYKMKNDTVWDLNMYKSEYFIKQILLNLGVIFFFTLSLITCIFLIISLWRHNRQMQSNVTGLRDSNTEAHVKAMKVLISFIILFILYFIGMAIEISCFTVRENKLLLMFGMTTTAIYPWGHSFILILGNSKLKQASLRVLQQLKCCEKRKNLRVT

SEQ ID NO: 690 - protein, 70 aa, Homo sapiens
AAMRRWASSSLEGEELSTQRDLTRKVHPPSTQEAPADSMCFRLCWPNGLCRDYSALPLWLQSDHRPSESE

SEQ ID NO: 691 - protein, 88 aa, Homo sapiens
  SITE (63): Xaa equals any of the naturally occurring L-amino acids
  SITE (73): Xaa equals any of the naturally occurring L-amino acids
MPVGSLPHPGCLWAAFLTLDACGLPSSPWMPVGSLPHPGCLWAAFLTLDACGQPSSPWMPVGXLLTLDACGQXSSPGCLWAAFLTWSL

SEQ ID NO: 692 - protein, 190 aa, Homo sapiens [sequence omitted]

SEQ ID NO: 693 - protein, 38 aa, Homo sapiens
MWLSPVPGVCAAVLALSFWIAKFPGEGTAIAKALGRLK

SEQ ID NO: 694 - protein, 38 aa, Homo sapiens; identical to SEQ ID NO: 693

SEQ ID NO: 695 - protein, 26 aa, Homo sapiens
GLFLGQMNWIFSCCFSNNVTTTVKKR

SEQ ID NO: 696 - protein, 166 aa, Homo sapiens [sequence omitted]

SEQ ID NO: 697 - protein, 166 aa, Homo sapiens [sequence omitted]

SEQ ID NO: 698 - protein, 61 aa, Homo sapiens
MVLINSGKPGSKCCWVFRPGLSAPCSALWWGCPGLALSLSGPQVRLFTRRYETTLPNTGPW

SEQ ID NO: 699 - protein, 54 aa, Homo sapiens
MLLGLQARLVSSLLCSVVGCLGCSFFCPRRYYKKLNLHKACMENSVSAEIRSDR

SEQ ID NO: 700 - protein, 240 aa, Homo sapiens
MSRYLLPLSALGTVAGAAVLLKDYVTGGACPSKATIPGKTVIVTGANTGIGKQTALELARRGGNIILACRDMEKCEAAAKDIRGETLNHHVNARHLDLASLKSIREFAAKIIEEEERVDILINNAGVMRCPHWTTEDGFEMQFGVNHLGHFLLTNLLLDKLKASAPSRIINLSSLAHVAGHIDFDDLNWQTRKYNTKAAYCQSKLAIVLFTKELSRRLQGTGALGSASLLLYSEPRAAFP

SEQ ID NO: 701 - protein, 246 aa, Homo sapiens
  SITE (222): Xaa equals any of the naturally occurring L-amino acids
  SITE (223): Xaa equals any of the naturally occurring L-amino acids
  SITE (236): Xaa equals any of the naturally occurring L-amino acids
  SITE (242): Xaa equals any of the naturally occurring L-amino acids
  SITE (244): Xaa equals any of the naturally occurring L-amino acids
MGAAVFFGCTFVAFGPAFALFLITVAGDPLRVIILVAGAFFWLVSLLLASVVWFILVHVTDRSDARLQYGLLIFGAAVSVLLQEVFRFAYYKLLKKADEGLASLSEDGRSPISIRQMAYVSGLSFGIISGVFSVINILADALGPGVVGIHGDSPYYFLTSAFLTAAIILLHTFWGVVFFDACERRRYWALGLVVGSHLLTSGLTFLNPWYEASLLPSMQSLXXWGSGPSSQLEGPXKYSAQXLXKD

SEQ ID NO: 702 - protein, 5 aa, Homo sapiens
GEIFL

SEQ ID NO: 703 - protein, 84 aa, Homo sapiens
KMHFNKNKSILKSFSFVRGNMNEIHSYLKTEYFTAKTLNISRAYHILNTLWSCSYFNIPGSGGQLACLWLRICFHACFLSFFYL

SEQ ID NO: 704 - protein, 5 aa, Homo sapiens
VLLIL

SEQ ID NO: 705 - protein, 266 aa, Homo sapiens
  SITE (45): Xaa equals any of the naturally occurring L-amino acids
  SITE (47): Xaa equals any of the naturally occurring L-amino acids
  SITE (51): Xaa equals any of the naturally occurring L-amino acids
  SITE (134): Xaa equals any of the naturally occurring L-amino acids
  SITE (183): Xaa equals any of the naturally occurring L-amino acids
  SITE (222): Xaa equals any of the naturally occurring L-amino acids
  SITE (224): Xaa equals any of the naturally occurring L-amino acids
  SITE (255): Xaa equals any of the naturally occurring L-amino acids
MPRHLSGLLLLLWPLLLLLPPTPAAPGPLARPGLRRLGTRGPGGXPXRRPXSAVPTRAPYSGAGQPGGARGAGVCRSRPLDLVFIIDSSRSVRPLEFTKVKTFVSQIIDTLDIGAADTRVAVVNYASTVKIEFXLQTHSDKQSLKQAVARITPLSTGTMSGLAIQTAMDEAFTVEAGARGPTXNIPKVAIIVTDGRPQDQVNEVAARARASGIELYAVGVDXAXMESLQDEWPAKPLDEHVFYVETYGVIEKPSXRFQETLLRSWN

SEQ ID NO: 706 - protein, 484 aa, Homo sapiens
MPRHLSGLLLLLWPLLLLLPPTPAAPGPLARPGLRRLGTRGPGGSPGRRPGSAVPTRAPYSGAGQPGGARGAGVCRSRPLDLVFIIDSSRSVRPLEFTKVKTFVSQIIDTLDIGAADTRVAVVNYASTVKIEFHLQTHSDKQSLKQAVARITPLSTGTMSGLAIQTAMDEAFTVEAGARGPTSNIPKVAIIVTDGRPQDQVNEVAARARASGIELYAVGVDRADMESLKMMASEPLDEHVFYVETYGVIEKLSSRFQETFCALDPCVLGTHRCQHVCVSDGEGKHHCECSQGYSLNADQKTCSAIDKCALNTHGCEHICVNDRTGSYHCECYEGYTLNQDRKTCSAQDQCAFGTHGCQHICVNDRDGSHHCECYEGYTLNADNKTCSVRSECAGGSHGCQHLCVDDGPAAYHCDCFPGYTLTEDRRTCAAIEEARRLVSTEDACGCEATLAFQERASSYLQRLNAKLDDILGKLQADAYGQIHR

SEQ ID NO: 707 - protein, 368 aa, Homo sapiens
  SITE (310): Xaa equals any of the naturally occurring L-amino acids
  SITE (365): Xaa equals any of the naturally occurring L-amino acids
MQPSSLLPLALCLLAAPASALVRIPLHKFTSIRRTMSEVGGSVEDLIAKGPVSKYSQAVPAVTEGPIPEVLKNYMDAQYYGEIGIGTPPQCFTVVFDTGSSNLWVPSIHCKLLDIACWIHHKYNSDKSSTYVKNGTSFDIHYGSGSLSGYLSQDTVSVPCQSASSASALGGVKVERQVFGEATKQPGITFIAAKFDGILGMAYPRISVNNVLPVFDNLMQQKLVDQNIFSFYLSRDPDAQPGGELMLGGTDSKYYKGSLSYLNVTRKAYWQVHLDQVEVASGLTLCKEGCEAIVDTGTSLMVGPVDEVRXLQKAIGAVPLIQGEYMIPCEKVSTLPAITLKLGGKGYKLSPEDYTLKVSQAGKTXCLS

SEQ ID NO: 708 - protein, 92 aa, Homo sapiens
  SITE (43): Xaa equals any of the naturally occurring L-amino acids
  SITE (69): Xaa equals any of the naturally occurring L-amino acids
  SITE (70): Xaa equals any of the naturally occurring L-amino acids
LVVLGVCAAQHELTPRLRAGVPVQVEREDVLLHQLLLHQVIKXGKHIVDRDAGVGHAQDAVELGRDEGXXRLLGGFPERLPLHLDASQARQT

SEQ ID NO: 709 - protein, 115 aa, Homo sapiens
  SITE (50): Xaa equals any of the naturally occurring L-amino acids
  SITE (70): Xaa equals any of the naturally occurring L-amino acids
  SITE (86): Xaa equals any of the naturally occurring L-amino acids
  SITE (100): Xaa equals any of the naturally occurring L-amino acids
MQPPSLLLLVLGLLAAPAAALVRIPLHKFTSVRRTMSELGGPVEDLIARXPISKYAQGVPSVAGGPVPEXLKETTWNAQILRGKFXHPGTPPRKLLPPVXPFEKRGSFPTLLGSP

SEQ ID NO: 710 - protein, 410 aa, Homo sapiens
MQPPSLLLLVLGLLAAPAAALVRIPLHKFTSVRRTMSELGGPVEDLIARGPISKYAQGVPSVAGGPVPEVLRNYMDAQYYGEIGIGTPPQCFTVVFDTGSSNLWVPSIHCKLLDIACWIHHKYNSGKSSTYVKNGTSFDIHYGSGSLSGYLSQDTVSVPCKSGLSSLAGVKVERQTFGEATKQPGITFIAAKFDGILGMAYPRISVNNVLPVFDNLMQQKLVEKNIFSFYLNRDPGAQPGGELMLGGTDSKYYKGPLSYLNVTRKAYWQVHMEQVDVGSSLTLCKGGCEAIVDTGTSLIVGPVDEVRELQKAIGAVPLIQGEYMIPCEKVSTLPEVTLTLGGKPYKLSSEDYTLKVSQGGKSICLSGFMGMDIPPPGGPLWILGDVFIGRYYTVFDRDQNRVGLAEATRL

SEQ ID NO: 711 - protein, 96 aa, Homo sapiens
  SITE (25): Xaa equals any of the naturally occurring L-amino acids
  SITE (77): Xaa equals any of the naturally occurring L-amino acids
  SITE (79): Xaa equals any of the naturally occurring L-amino acids
AAREGAPPPCPTSAIGRASLSLRDXGRGLRDARREKRRGVRGQDGGDYGWCGPARGRGVAAKGTAEGPTGENRAQGXKXGVRVAVEASSVRGPGRA

SEQ ID NO: 712 - protein, 453 aa, Homo sapiens
  SITE (432): Xaa equals any of the naturally occurring L-amino acids
MRMASIMVWVMIIMVILVLGYGIFHCYMEYSRLRGEAGSDVSLVDLGFQTDFRVYLHLRQTWLAFMIILSILEVIIILLLIFLRKRILIAIALIKEASRAVGYVMCSLLYPLVTFFLLCLCIAYWASTAVFLSTSNEAVYKIFDDSPCPFTAKTCNPETFPSSNESRQCPNARCQFAFYGGESGYHRALLGLQIFNAFMFFWLANFVLALGQVTLAGAFASYYWALRKPDDLPAFPLFSAFGRALRYHTGSLAFGALILAIVQIIRVILEYLDQRLKAAENKFAKCLMTCLKCCFWCLEKFIKFLNRNAYIMIAIYGTNFCTSARNAFFLLMRNIIRVAVLDKVTDFLFLLGKLLIVGSVGILAFFFFTHRIRIVQDTAPPLNYYWVPILTVIVGSYLIAHGFFSVYGMCVDTLFLCFLEDLERNDGSAERXYFMSSTLKKLLNKTNKKAAES

SEQ ID NO: 713 - protein, 453 aa, Homo sapiens
MRMASIMVWVMIIMVILVLGYGIFHCYMEYSRLRGEAGSDVSLVDLGFQTDFRVYLHLRQTWLAFMIILSILEVIIILLLIFLRKRILIAIALIKEASRAVGYVMCSLLYPLVTFFLLCLCIAYWASTAVFLSTSNEAVYKIFDDSPCPFTAKTCNPETFPSSNESRQCPNARCQFAFYGGESGYHRALLGLQIFNAFMFFWLANFVLALGQVTLAGAFASYYWALRKPDDLPAFPLFSAFGRALRYHTGSLAFGALILAIVQIIRVILEYLDQRLKAAENKFAKCLMTCLKCCFWCLEKFIKFLNRNAYIMIAIYGTNFCTSARNAFFLLMRNIIRVAVLDKVTDFLFLLGKLLIVGSVGILAFFFFTHRIRIVQDTAPPLNYYWVPILTVIVGSYLIAHGFFSVYGMCVDTLFLCFLEDLERNDGSAERPYFMSSTLKKLLNKTNKKAAES

SEQ ID NO: 714 - protein, 84 aa, Homo sapiens
  SITE (56): Xaa equals any of the naturally occurring L-amino acids
GRPTRPLSAQNASVNFWEASTLAAQRELAMQFLCPGNHCFPCHLLCAQKRYNSHQXTPVVTAHLVCCVFQQSVLLGVQLNRLGV

SEQ ID NO: 715 - protein, 32 aa, Homo sapiens
MWWALLACRFCCPRRCASAWQGLPRRGALFSG

SEQ ID NO: 716 - protein, 53 aa, Homo sapiens
  SITE (26): Xaa equals any of the naturally occurring L-amino acids
MWWALLALPFLLPTALRLCLAGLPHXFRHTNRMVPQWHQSGDRPLHSHPHSRF

SEQ ID NO: 717 - protein, 744 aa, Homo sapiens
MWWALLALPFLLPTALRLCLAGPPPERGPLFWLTRQDSRESGAANATVSPCEGLPSAGASTLTLANRSLERLPNCLPPALRSLDASHNLLRALSAPELGALPRLQALTLRHNRIAELRWGPGGPAALHTLDLSYNQLATLPPCAGPALPGLRSLALAGNPLQALQPGAFACLPALRLLNLSGTALGRDLGAGIADGAFAGAGGALEVLDLSGTFLERVRSGWIRDLPKLTSLHLRKMPRLRILEAAVFKMTPNLQQLDCQDSSALTSVHTQLFQDTPRLQVLLFQNCNLSSFPPWSLHSSQVLSISLFGNPLICSCELSWLLRDAKRTVLSRAADTVCVPASGSRDTFSAPLSLSQLPTVCHLDQSTTLHSSSPQAVPFTHQPSTQGLTTPWSTAPSTRPVEAEQSVTKPLSFPTDSATQTAWSHSGIKVGTARSTAIPTADSSTSSAPRRAANTAGAEHQEHAPMLVHAPHVSAASTPSASKHPGLFPTPWSQVRTPQPDYRAQATLQAPHPSPSEGAIPVLLLDESSEEEEEGQKEEVGAPPQDVPCDYHPCKHLQTPCAELQRRSRCRCPGLSGEDSLPDPPRLQAVTETTDTSALVRWCAPNSVVHGYQIHYSPEGWAENQSVTVVADIYATARQHPLYGLSPGTMYRVCVLAANRAGLSQPVQASGWTRACAAFTTKPSFVLVFAGLCAACGLLLVTTLLLAACLCRRSRTVRLQRYNTHLVAYKNPAFDYPLKLQTLS

SEQ ID NO: 718 - protein, 153 aa, Homo sapiens
AIHFTQQDMPQIRRQIYKELCHANSLCERRIPGLKPMVKGMGTWGTLPSRETPVPLLPLPLPVPYGFSYLNVLIDFCIFFSLREYLLIFDVQGVAMEQPLLPLLGRSLALWPGWGGHPPSRVQGRGQEHLCWGGGRAKGVCLPDIQTLFYTYI

SEQ ID NO: 719 - protein, 46 aa, Homo sapiens
MRMKMRKRKWQLGGCPPDGVSWELPSGLVLPALLIEKPAPSAAAEP

SEQ ID NO: 720 - protein, 99 aa, Homo sapiens
GVSWEGTPMSPFPFMGLGSGVRGSHSEFAVTQLLVDLPTKFGHVLLGEAEWLRQGQMLAVLQHKSTTVTVIILPGHIHFEVTFPALVEIQSVFLYRLCL

SEQ ID NO: 721 - protein, 90 aa, Homo sapiens
MDYGGLQSLLWTLTLASSPVLFPMALGDPPGQKGSGVWHPLMPASSSAMCAASGTMWPRSYFRAQIWAPQKRQSGPGRKPASTAPCGRSM

SEQ ID NO: 722 - protein, 288 aa, Homo sapiens
  SITE (10): Xaa equals any of the naturally occurring L-amino acids
  SITE (15): Xaa equals any of the naturally occurring L-amino acids
  SITE (268): Xaa equals any of the naturally occurring L-amino acids
  SITE (271): Xaa equals any of the naturally occurring L-amino acids
  SITE (273): Xaa equals any of the naturally occurring L-amino acids
  SITE (274): Xaa equals any of the naturally occurring L-amino acids
  SITE (276): Xaa equals any of the naturally occurring L-amino acids
  SITE (286): Xaa equals any of the naturally occurring L-amino acids
FSSSACPSVXSLFVXLGKNPHDAQGHPRASEDQPSSGKPVTSYPGECGFVFTKEASLEIRDMLLANKVPAAARAGAIAPCEVTVPAQNTGLGPEKTSFFQALGITTKISRGTIEILSDVQLIKTGDKVGASEATLLNMLNISPFSFGLIIQQVFDNGSIYNPEVLDITEETLHSRFLEGVRNVASVCLQIGYPTVASVPHSIINGYKRVLALSVETDYTFPLAEKVKAFLADPSAFVAAAPVAAATTAAPAAAAAPAKVEAKEESEEXDEXIXXSXISKSNNSSQXIV

SEQ ID NO: 723 - protein, 112 aa, Homo sapiens
  SITE (71): Xaa equals any of the naturally occurring L-amino acids
  SITE (103): Xaa equals any of the naturally occurring L-amino acids
  SITE (112): Xaa equals any of the naturally occurring L-amino acids
MKTLLLLVGLLLTWENGRVLGDQMVSDTELQEMSTEGSKYINREIKNALKGVKQIKTLIEQTNEERKSLLXNLEEAKKKKEDALNDTKDSEMKLKASPGVFNXTLDGPLGGX

SEQ ID NO: 724 - protein, 14 aa, Homo sapiens
LLLVGLQQLVVQAW

SEQ ID NO: 725 - protein, 7 aa, Homo sapiens
LLVVLLS

SEQ ID NO: 726 - protein, 139 aa, Homo sapiens
MKTLLLLVGLLLTWENGRVLGDQMVSDTELQEMSTEGSKYINREIKNALKGVKQIKTLIEQTNEERKSLLTNLEEAKKKKEDALNDTKDSEMKLKASQGVCNDTMMALWEECKPCLKQTWGKGLRPSLQKQHRAGWPPG

SEQ ID NO: 727 - protein, 112 aa, Homo sapiens
  SITE (103): Xaa equals any of the naturally occurring L-amino acids
  SITE (112): Xaa equals any of the naturally occurring L-amino acids
MKTLLLLVGLLLTWENGRVLGDQMVSDTELQEMSTEGSKYINREIKNALKGVKQIKTLIEQTNEERKSLLTNLEEAKKKKEDALNDTKDSEMKLKASPGVFNXTLDGPLGGX

SEQ ID NO: 728 - protein, 6 aa, Homo sapiens
MLLLYL

SEQ ID NO: 729 - protein, 14 aa, Homo sapiens
PQGPNDVTAKLLCP

SEQ ID NO: 730 - protein, 67 aa, Homo sapiens
MAPSGPLLLVLLVPLAAARPGPTSVPAGAAACPCGGTSCRGWGAGPTPGRTSTCPHLTCPRAGTGAT

SEQ ID NO: 731 - protein, 129 aa, Homo sapiens
MAPSGPLLLVLLVPLAAARAGPYFRPGRGCRLPLRGDQLSGLGRRTYPRPHEYLSPSDLPKSWDWRNVNGVNYASATRNQHIPQYCGSCWAHGSTSAMAGPDQHQEKGGVALHPAVRAARPRLRQRGLL

SEQ ID NO: 732 - protein, 208 aa, Homo sapiens
MGLGARGAWAALLLGTLQVLALLGAAHESAAMAASANIENSGLPHNSSANSTETLQHVPSDHTNETSNSTVKPPTSVASDSSNTTVTTMKPTAASNTTTPGMVSTNMTSTTLKSTPKTTSVSQNTSQISTSTMTVTHNSSVTSAASSVTITTTMHSEAKKGSKFDTGSFVGGIVLTLGVLSILYIGCKMYYSRRGIRYRTIDEHDAII

SEQ ID NO: 733 - protein, 208 aa, Homo sapiens; identical to SEQ ID NO: 732

SEQ ID NO: 734 - protein, 208 aa, Homo sapiens; identical to SEQ ID NO: 732

SEQ ID NO: 735 - protein, 208 aa, Homo sapiens; identical to SEQ ID NO: 732

SEQ ID NO: 736 - protein, 365 aa, Homo sapiens
  SITE (144): Xaa equals any of the naturally occurring L-amino acids
  SITE (201): Xaa equals any of the naturally occurring L-amino acids
MFVGLMAFLLSFYLIFTNEGRALKTATSLAEGLSLVVSPDSIHSVAPENEGRLVHIIGALRTSKLLSDPNYGVHLPAVKLRRHVEMYQWVETEESREYTEDGQVKKETRYSYNTEWRSEIINSKNFDREIGHKNPSAMAVESFXATAPFVQIGRFFLSSGLIDKVDNFKSLSLSKLEDPHVDIIRRGDFFYHSENPKYPEXGDLRVSFSYAGLSGDDPDLGPAHVVTVIARQRGDQLVPFSTKSGDTLLLLHHGDFSAEEVFHRELRSNSMKTWGLRAAGWMAMFMGLNLMTRILYTLVDWFPVFRDLVNIGLKAFAFCVATSLTLLTVAAGWLFYRPLWALLIAGLALVPILVARTRVPAKKLE

SEQ ID NO: 737 - protein, 365 aa, Homo sapiens
MFVGLMAFLLSFYLIFTNEGRALKTATSLAEGLSLVVSPDSIHSVAPENEGRLVHIIGALRTSKLLSDPNYGVHLPAVKLRRHVEMYQWVETEESREYTEDGQVKKETRYSYNTEWRSEIINSKNFDREIGHKNPSAMAVESFMATAPFVQIGRFFLSSGLIDKVDNFKSLSLSKLEDPHVDIIRRGDFFYHSENPKYPEVGDLRVSFSYAGLSGDDPDLGPAHVVTVIARQRGDQLVPFSTKSGDTLLLLHHGDFSAEEVFHRELRSNSMKTWGLRAAGWMAMFMGLNLMTRILYTLVDWFPVFRDLVNIGLKAFAFCVATSLTLLTVAAGWLFYRPLWALLIAGLALVPILVARTRVPAKKLE

SEQ ID NO: 738 - protein, 34 aa, Homo sapiens
MLWPCCPSPLPIWASPSPRLTWWCLLSCFGTQGC

SEQ ID NO: 739 - protein, 34 aa, Homo sapiens; identical to SEQ ID NO: 738

SEQ ID NO: 740 - protein, 41 aa, Homo sapiens
MRHCCWLWSSCMLWEPSTTLGSSPRLVERWQSCRWTPCCPK

SEQ ID NO: 741 - protein, 41 aa, Homo sapiens; identical to SEQ ID NO: 740

SEQ ID NO: 742 - protein, 18 aa, Homo sapiens
VHKSAGLLWEATGEGPGS

SEQ ID NO: 743 - protein, 197 aa, Homo sapiens
VEIVHELKGEGKAQRKISAIHILDVLVLNGTDVREQHFNQRIQLAEKFVKAVSKPSRPDMNPIRVKEVYRLEEMEKIFVRLEMKIIKGSSGTPKLSYTGRDDRHFVPMGLYIVRTVNEPWTMGFSKSFKKKFFYNKKTKDSTFDLPADSIAPFHICYYGRLFWEWGDGIRVHDSQKPQDQDKLSKEDVLSFIQMHRA

SEQ ID NO: 744 - protein, 1 aa, Homo sapiens
N

SEQ ID NO: 745 - protein, 61 aa, Homo sapiens
  SITE (58): Xaa equals any of the naturally occurring L-amino acids
MHSKQTLLWKELLLAIPCIIASPRSLWPRWASGKVKDWVNTARVGRTSLRLPVRKVEXAWV

SEQ ID NO: 746 - protein, 61 aa, Homo sapiens
MHSKQTLLWKELLLAIPCIIASPRSLWPRWASGKVKDWVNTARVGRTSLRLPVRKVEEAWV

SEQ ID NO: 747 - protein, 53 aa, Homo sapiens
NYNRGGTFLYQKAKIKHHVLMVFYKSTSNSTESLIWSLLNSWSDKVTFPKRVR

SEQ ID NO: 748 - protein, 56 aa, Homo sapiens
  SITE (35): Xaa equals any of the naturally occurring L-amino acids
  SITE (42): Xaa equals any of the naturally occurring L-amino acids
  SITE (46): Xaa equals any of the naturally occurring L-amino acids
KSQMQSFTIVTAYGRCLSLTCLPTLNQMLVFKSNXSLVSPHXLTFXNIFARFENFQ

SEQ ID NO: 749 - protein, 11 aa, Homo sapiens
FLVCLLLGPRS

SEQ ID NO: 750 - protein, 6 aa, Homo sapiens
TVAIYD

SEQ ID NO: 751 - protein, 46 aa, Homo sapiens
  SITE (45): Xaa equals any of the naturally occurring L-amino acids
INHVFIWGSIAIYFSILFTMHSNGIFGIFPNQFPFVGNARHSLTXK

SEQ ID NO: 752 - protein, 109 aa, Homo sapiens
  SITE (94): Xaa equals any of the naturally occurring L-amino acids
MNTLVLWIFGFLICLGIILAIGNSIWESQTGDQFRTFLFWNEGEKSSVFSGFLTFWSYIIILNTVVPISLYVSVEVIRLGHSYFINWDRKMYYXRKAIPAVARTTTLNE

SEQ ID NO: 753 - protein, 937 aa, Homo sapiens
MQNSGKTKFKRTSIDRLMNTLVLWIFGFLICLGIILAIGNSIWESQTGDQFRTFLFWNEGEKSSVFSGFLTFWSYIIILNTVVPISLYVSVEVIRLGHSYFINWDRKMYYSRKAIPAVARTTTLNEELGQIEYIFSDKTGTLTQNIMTFKRCSINGRIYGEVHDDLDQKTEITQEKEPVDFSVKSQADREFQFFDHNLMESIKMGDPKVHEFLRLLALCHTVMSEENSAGELIYQVQSPDEGALVTAARNFGFIFKSRTPETITIEELGTLVTYQLLAFLDFNNTRKRMSVIVRNPEGQIKLYSKGADTILFEKLHPSNEVLLSLTSDHLSEFAGEGLRTLAIAYRDLDDKYFKEWHKMLEDANVATEERDERIAGLYEEIERDLMLLGATAVEDKLQEGVIETVTSLSLANIKIWVLTGDKQETAINIGYACNMLTDDMNDVFVIAGNNAVEVREELRKAKQNLFGQNRNFSNGHVVCEKKQQLELDSIVEETITGDYALIINGHSLAHALESDVKNDLLELACMCKTVICCRVTPLQKAQVVELVKKYRNAVTLAIGDGANDVSMIKSAHIGVGISGQEGLQAVLASDYSFAQFRYLQRLLLVHGRWSYFRMCKFLCYFFYKNFAFTLVHFWFGFFCGFSAQTVYDQWFITLFNIVYTSLPVLAMGIFDQDVSDQNSVDCPQLYKPGQLNLLFNKRKFFICVMHGIYTSLVLFFIPYGAFYNVAGEDGQHIADYQSFAVTMATSLVIVVSVQIALDTSYWTFINHVFIWGSIAIYFSILFTMHSNGIFGIFPNQFPFVGNARHSLTQKCIWLVILLTTVASVMPVVAFRFLKVDLYPTLSDQIRRWQKAQKKARPPSSRRPRTRRSSSRRSGYAFAHQEGYGELITSGKNMRAKNPPPTSGLEKTHYNSTSWIENLCKKTTDTVSSFSQDKTVKL

SEQ ID NO: 754 - protein, 45 aa, Homo sapiens
INSCNIKGLKCFYIVFGCLLLVPISDKLYGLLHLIPFIWRVLLPC

SEQ ID NO: 755 - protein, 137 aa, Homo sapiens
MKLLVILLFSGLITGFRSDSSSSLPPKLLLVSFDGFRADYLKNYEFPHLQNFIKEGVLVEHVKNVFITKTFPNHYSIVTGLYEESHGIVANSMYDAVTKKHFSDSNDKDPFWWNEAVPIWVTNQLQETDQVAAAMWA

SEQ ID NO: 756 - protein, 6 aa, Homo sapiens
KMMMIL

SEQ ID NO: 757 - protein, 101 aa, Homo sapiens
  SITE (97): Xaa equals any of the naturally occurring L-amino acids
SFSFKVVDVFEVSKIVAEYFILGPCNGVSFNDCIIVIGGYEFQKSILGIQLMSGFYIGWNRKVCPVSILTLSTRHLPICLSLRSQNINSNCKLSKNXKSIC

SEQ ID NO: 758 - protein, 12 aa, Homo sapiens
LLTILLWSALSY

SEQ ID NO: 759 - protein, 453 aa, Homo sapiens
MKLLVILLFSGLITGFRSDSSSSLPPKLLLVSFDGFRADYLKNYEFPHLQNFIKEGVLVEHVKNVFITKTFPNHYSIVTGLYEESHGIVANSMYDAVTKKHFSDSNDKDPFWWNEAVPIWVTNQLQENRSSAAAMWPGTDVPIHDTISSYFMNYNSSVSFEERLNNITMWLNNSNPPVTFATLYWEEPDASGHKYGPEDKENMSRVLKKIDDLIGDLVQRLKMLGLWENLNVIITSDHGMTQCSQDRLINLDSCIDHSYYTLIDLSPVAAILPKINRTEVYNKLKNCSPHMNVYLKEDIPNRFYYQHNDRIQPIILVADEGWTIVLNESSQKLGDHGYDNSLPSMHPFLAAHGPAFHKGYKHSTINIVDIYPMMCHILGLKPHPNNGTFGHTKCLLVDQWCINLPEAIAIVIGSLLVLTMLTCLIIIMQNRLSVPRPFSRLQLQEDDDDPLIG

SEQ ID NO: 760 - protein, 11 aa, Homo sapiens
WHILQMKGLTW

SEQ ID NO: 761 - protein, 31 aa, Homo sapiens
FAIFIYFSVSYIADGNEFEVPRAEDPCLLCF

SEQ ID NO: 762 - protein, 245 aa, Homo sapiens
  SITE (110): Xaa equals any of the naturally occurring L-amino acids
MRIFAVFIFMTYWHLLNAFTVTVPKDLYVVEYGSNMTIECKFPVEKQLDLAALIVYWEMEDKNIIQFVHGEEDLKVQHSSYRQRARLLKDQLSLGNAALQITDVKLQDAXVYRCMISYGGADYKRITVKVNAPYNKINQRILVVDPVTSEHELTCQAEGYPKAEVIWTSSDHQVLSGKTTTTNSKREEKLFNVTSTLRINTTTNEIFYCTFRRLDPEENHTAELVIPGNILNVSIKICLTLSPST

SEQ ID NO: 763 - protein, 290 aa, Homo sapiens
MRIFAVFIFMTYWHLLNAFTVTVPKDLYVVEYGSNMTIECKFPVEKQLDLAALIVYWEMEDKNIIQFVHGEEDLKVQHSSYRQRARLLKDQLSLGNAALQITDVKLQDAGVYRCMISYGGADYKRITVKVNAPYNKINQRILVVDPVTSEHELTCQAEGYPKAEVIWTSSDHQVLSGKTTTTNSKREEKLFNVTSTLRINTTTNEIFYCTFRRLDPEENHTAELVIPELPLAHPPNERTHLVILGAILLCLGVALTFIFRLRKGRMMDVKKCGIQDTNSKKQSDTHLEET

SEQ ID NO: 764 - protein, 91 aa, Homo sapiens
  SITE (40): Xaa equals any of the naturally occurring L-amino acids
SVSKKKKKKKVFCILYKLVVVGSRGLSTDDLMRSVSRFAXSQTFVLLNSSSFFSFLETESSSVTRLECSGTIKAYCSLYLPGSRNPPTLAS

SEQ ID NO: 765 - protein, 53 aa, Homo sapiens
MVYCVVSPRRATLFCVLLLGTRCEIISVRSSFGEYDKINSILKGLLKIPFNEF

SEQ ID NO: 766 - protein, 95 aa, Homo sapiens
PPRTRLFLVILFCCFRRNDTSFCFFEEKVFHVTVARTNTKRSRLQMLQACAVVCVCVCVCVCVCTYIYGKHIYCCAARGKPAKKCVCLYEMFEKR

SEQ ID NO: 767 - protein, 53 aa, Homo sapiens; identical to SEQ ID NO: 765

SEQ ID NO: 768 - protein, 41 aa, Homo sapiens
MPSGCRCLHLVCLLCILGAPGQPVRADDCSPTVTWPTAAVN

SEQ ID NO: 769 - protein, 20 aa, Homo sapiens
PGLCSQLHVPLLGGLCGCPL

SEQ ID NO: 770 - protein, 383 aa, Homo sapiens
MPSGCRCLHLVCLLCILGAPGQPVRADDCSSHCDLAHGCCAPDGSCRCDPGWEGLHCERCVRMPGCQHGTCHQPWQCICHSGWAGKFCDKDEHICTTQSPCQNGGQCMYDGGGEYHCVCLPGFHGRDCERKAGPCEQAGSPCRNGGQCQDDQGFALNFTCRCLVGFVGARCEVNVDDCLMRPCANGATCLDGINRFSCLCPEGFAGRFCTINLDDCASRPCQRGARCRDRVHDFDCLCPSGYGGKTCELVLPVPDPPTTVDTPLGPTSAVVVPATGPAPHSAGAGLLRISVKEVVRRQEAGLGEPSLVALVVFGALTAALVLATVLLTLRAWRRGVCPPGPCCYPAPHYAPACQDQECQVSMLPAGLPLPRDLPPEPGKTTAL

SEQ ID NO: 771 - protein, 10 aa, Homo sapiens
PQTAGPQKCA

SEQ ID NO: 772 - protein, 10 aa, Homo sapiens
PFPAGPHSWI

SEQ ID NO: 773 - protein, 35 aa, Homo sapiens
MGRGPWDAGPSRRLLPLLLLLGLARGAAERRAPTV

SEQ ID NO: 774 - protein, 747 aa, Homo sapiens
MGRGPWDAGPSRRLLPLLLLLGLARGAAGAPGPDGLDVCATCHEHATCQQREGKKICICNYGFVGNGRTQCVDKNECQFGATLVCGNHTSCHNTPGGFYCICLEGYRATNNNKTFIPNDGTFCTDIDECEVSGLCRHGGRCVNTHGSFECYCMDGYLPRNGPEPFHPTTDATSCTEIDCGTPPEVPDGYIIGNYTSSLGSQVRYACREGFFSVPEDTVSSCTGLGTWESPKLHCQEINCGNPPEMRHAILVGNHSSRLGGVARYVCQEGFESPGGKITSVCTEKGTWRESTLTCTEILTKINDVSLFNDTCVRWQINSRRINPKISYVISIKGQRLDPMESVREETVNLTTDSRTPEVCLALYPGTNYTVNISTAPPRRSMPAVIGFQTAEVDLLEDDGSFNISIFNETCLKLNRRSRKVGSEHMYQFTVLGQRWYLANFSHATSFNFTTREQVPVVCLDLYPTTDYTVNVTLLRSPKRHSVQITIATPPAVKQTISNISGFNETCLRWRSIKTADMEEMYLFHIWGQRWYQKEFAQEMTFNISSSSRDPEVCLDLRPGTNYNVSLRALSSELPVVISLTTQITEPPLPEVEFFTVHRGPLPRLRLRKAKEKNGPISSYQVLVLPLALQSTFSCDSEGASSFFSNASDADGYVAAELLAKDVPDDAMEIPIGDRLYYGEYYNAPLKRGSDYCIILRITSEWNKVRRHSCAVWAQVKDSSLMLLQMAGVGLGSLAVVIILTFLSFSAV

SEQ ID NO: 775 - protein, 45 aa, Homo sapiens
TWWPPCPPAPMGQVGSCFAGLCGQHTRGLHGWPQPSPAAPQMRSC

SEQ ID NO: 776 - protein, 17 aa, Homo sapiens
GWCSRRDSCWPSPPTMP

SEQ ID NO: 777 - protein, 120 aa, Homo sapiens
  SITE (103): Xaa equals any of the naturally occurring L-amino acids
MGTVSSRRSWWPLPLLLLLLLLLGPAGARAQEDEDGDYEELVLALRSEEDGLAEAPEHGTTATFHRCAKDPWRLPGTYVVVLKEETHLSQSERTARRLQAQAXRRGYLPRSCMSSMAFFL

SEQ ID NO: 778 - protein, 269 aa, Homo sapiens
  SITE (236): Xaa equals any of the naturally occurring L-amino acids
  SITE (257): Xaa equals any of the naturally occurring L-amino acids
MGTVSSRRSWWPLPLLLLLLLLLGPAGARAQEDEDGDYEELVLALRSEEDGLAEAPEHGTTATFHRCAKDPWRLPGTYVVVLKEETHLSQSERTARRLQAQAARRGYLTKILHVFHGLLPGFLVKMSGDLLELALKLPHVDYIEEDSSVFAQSIPWNLERITPPRYRADEYQPPDGGSLVEVYLLDTSIQSDHREIEGRVMVTDFENVPEEDGTRFHRQASKCDSHGPTWQGWSAXGMPAWPRVPACAACACFPKKXPLLGGPPQKKGG

SEQ ID NO: 779 - protein, 107 aa, Homo sapiens
  SITE (92): Xaa equals any of the naturally occurring L-amino acids
MVRYTYSMLSVIGISYAVLTWLSQTLWMPIYPLCVLAEAFAIYQSLPYFESFGTYSTKLPFDLSIYFPYVLKIYLMMLFIGMYFTYSHLYSXRRDILGIFPIKKKKM

SEQ ID NO: 780 - protein, 37 aa, Homo sapiens
MVRYTYSMLSVIGISYAVLTWAQSNTMDANLSFVCSC

SEQ ID NO: 781 - protein, 107 aa, Homo sapiens
MVRYTYSMLSVIGISYAVLTWLSQTLWMPIYPLCVLAEAFAIYQSLPYFESFGTYSTKLPFDLSIYFPYVLKIYLMMLFIGMYFTYSHLYSERRDILGIFPIKKKKM

SEQ ID NO: 782 - protein, 53 aa, Homo sapiens
  SITE (40): Xaa equals any of the naturally occurring L-amino acids
SNPSHILMISILLSHASRGAGADPKRSCCPQRVGSRGRAXVRLTRLCSQPSPH

SEQ ID NO: 783 - protein, 33 aa, Homo sapiens
HHVAQALPPAGAPRGRPHQPHPAPVGQGSPERG

SEQ ID NO: 784 - protein, 74 aa, Homo sapiens
MGFHHVSQAALVLLLLLLLLLLFDTESRSSLATERDSISKKKNKKTKKKNRKETKNVVLILINSNSFMWLAAAL

SEQ ID NO: 785 - protein, 74 aa, Homo sapiens; identical to SEQ ID NO: 784

SEQ ID NO: 786 - protein, 178 aa, Homo sapiens
  SITE (157): Xaa equals any of the naturally occurring L-amino acids
  SITE (170): Xaa equals any of the naturally occurring L-amino acids
  SITE (171): Xaa equals any of the naturally occurring L-amino acids
  SITE (177): Xaa equals any of the naturally occurring L-amino acids
MAAPRGRAAPWTTALLLLLASQVLSPGSCADEEEVPEEWVLLHVVQGQIGAGNYSYLRLNHEGKIVLRMRSLKGDADLYVSASSLHPSFDDYELQSATCGPDAVSIPAHFRRPVGIGVYGHPSHLESEFEMKVYYDGTVEQHPFGEAAYPADGQMPXRSTLVPRKTPRKXXNLFSGXY

SEQ ID NO: 787 - protein, 191 aa, Homo sapiens
MAAPRGRAAPWTTALLLLLASQVLSPGSCADEEEVPEEWVLLHVVQGQIGAGNYSYLRLNHEGKIVLRMRSLKGDADLYVSASSLHPSFDDYELQSATCGPDAVSIPAHFRRPVGIGVYGHPSHLESEFEMKVYYDGTVEQHPFGEAAYPADGADAGQKHAGAPEDASQEEESVLWTILISILKLELEILF

SEQ ID NO: 788 - protein, 8 aa, Homo sapiens
TAIFFLLV

SEQ ID NO: 789 - protein, 56 aa, Homo sapiens
  SITE (9): Xaa equals any of the naturally occurring L-amino acids
  SITE (24): Xaa equals any of the naturally occurring L-amino acids
  SITE (30): Xaa equals any of the naturally occurring L-amino acids
MRFWFLVFXFFFFPEAHVYPTSWXVSEQGXATISVTPGILNWIFVEEENNTVLDFP

SEQ ID NO: 790 - protein, 279 aa, Homo sapiens
EERWKSPEVRWAPGVAMEESGYESVLCVKPDVHVYRIPPRATNRGYRAAEWQLDQPSWSGRLRITAKGQMAYIKLEDRTSGELFAQAPVDQFPGTAVESVTDSSRYFVIRIEDGNGRRAFIGIGFGDRGDAFDFNVALQDHFKWVKQQCEFAKQAQNPDQGPKLDLGFKEGQTIKLNIANMKKKEGAAGNPRVRPASTGGLSLLPPPPGGKTSTLIPPPGEQLAVGGSLVQPAVAPSSGGAPVPWPQPNPATADIWGDFTKSTGSTSSQTQPGTGWVQF

SEQ ID NO: 791 - protein, 106 aa, Homo sapiens
RSRSKPRCNCEIVTIFFARFKIGPGRHRKRKIPKLCSSGSTIGRVYSLPGLLRRGSCLFGYITPDWFVLKINVIMLVSYLMVSLEHSPLILFERVGGRDCEGREKC

SEQ ID NO: 792 - protein, 56 aa, Homo sapiens [sequence omitted]

SEQ ID NO: 793 - protein, 41 aa, Homo sapiens
MTFSPLMCYCCCWVGWAFCLFVWWQSVVVGSGRAYIGFSSY

SEQ ID NO: 794 - protein, 41 aa, Homo sapiens; identical to SEQ ID NO: 793

SEQ ID NO: 795 - protein, 41 aa, Homo sapiens; identical to SEQ ID NO: 793

SEQ ID NO: 796 - protein, 43 aa, Homo sapiens
FLRFDGIIMEALYKLNEIGKGELTLSIMHSGLKIRFQNEMSDL

SEQ ID NO: 797 - protein, 12 aa, Homo sapiens
IGVNYLLLFFIF

SEQ ID NO: 798 - protein, 19 aa, Homo sapiens
KLGFSTILLLSIFIMSEAN

SEQ ID NO: 799 - protein, 19 aa, Homo sapiens
KLGFSTILLLSIFIMSEAN

SEQ ID NO: 800 - protein, 23 aa, Homo sapiens
LCVCTGCPGGGPQIPFRWQTERG

SEQ ID NO: 801 - protein, 29 aa, Homo sapiens
VCVCVCLIARVYFCIYVCVWLHGCASVCL

SEQ ID NO: 802 - protein, 6 aa, Homo sapiens
VLPSAS

SEQ ID NO: 803 - protein, 35 aa, Homo sapiens
  SITE (10): Xaa equals any of the naturally occurring L-amino acids
  SITE (27): Xaa equals any of the naturally occurring L-amino acids
MRASGVYVSXCSFVFMCVCVCMLNSRXTFDYGVCG

SEQ ID NO: 804 - protein, 56 aa, Homo sapiens
MRASGVYVSECSFVFMCVCVCMSDCTGVLLYLCVCVVARVCLCVSLTLAGCVCKSV

SEQ ID NO: 805 - protein, 60 aa, Homo sapiens
MIRIQFLHLFLWVGFIFRQPPSSYPQDGRDSPWSFPCRDRSPGNNTSIPSHETVLNFILT

SEQ ID NO: 806 - protein, 60 aa, Homo sapiens; identical to SEQ ID NO: 805

SEQ ID NO: 807 - protein, 444 aa, Homo sapiens
  SITE (92): Xaa equals any of the naturally occurring L-amino acids
  SITE (95): Xaa equals any of the naturally occurring L-amino acids
  SITE (97): Xaa equals any of the naturally occurring L-amino acids
  SITE (98): Xaa equals any of the naturally occurring L-amino acids
  SITE (101): Xaa equals any of the naturally occurring L-amino acids
MLQRIGLIFLHNIVVVSNCFYFQAFLDEFTNWSRINPNKARIPMAGDTQGVVGTVSKPCFTAYEMKIGAITFQVATGDIATEQVDVIVNSTXRTXNXXSGXSRAILEGAGQAVESECAVLAAQPHRDFIITPGGCLKCKIIIHVPGGKDVRKTVTSVLEECEQRKYTSVSLPAIGTGNAGKNPITVADNIIDAIVDFSSQHSTPSLKTVKVVIFQPELLNIFYDSMKKRDLSASLNFQSTFSMTTCNLPEHWTDMNHQLFCMVQLEPGQSEYNTIKDKFTRTCSSYAIEKIERIQNAFLWQSYQVKKRQMDIKNDHKNNERLLFHGTDADSVPYVNQHGFNRSCAGKNAVSYGKGTYFAVDASYSAKDTYSKPDSNGRKHMYVVRVLTGVFTKGRAGLVTPPPKNPHNPTDLFDSVTNNTRSPKLFVVFFDNQAYPEYLITFTA

SEQ ID NO: 808 - protein, 505 aa, Homo sapiens
  SITE (358): Xaa equals any of the naturally occurring L-amino acids
  SITE (494): Xaa equals any of the naturally occurring L-amino acids
  SITE (504): Xaa equals any of the naturally occurring L-amino acids
  SITE (505): Xaa equals any of the naturally occurring L-amino acids
MFRTAVMMAASLALTGAVVAHAYYLKHQFYPTVVYLTKSSPSMAVLYIQAFVLVFLLGKVMGKVFFGQLRAAEMEHLLERSWYAVTETCLAFTVFRDDFSPRFVALFTLLLFLKCFHWLAEDRVDFMERSPNISWLFHCRIVSLMFLLGILDFLFVSHAYHSILTRGASVQLVFGFEYAILMTMVLTIFIKYVLHSVDLQSENPWDNKAVYMLYTELFTGFIKVLLYMAFMTIMIKVHTFPLFAIRPMYLAMRQFKKAVTDAIMSRRAIRNMNTLYPDATPEELQAMDNVCIICREEMVTGAKRLPCNHIFHTSCLRSWFQRQQTCPTCRMDVLRASLPAQSPPPPEPADQGPPPAPXPPPLLPQPPNFPQGLLPPFPPGMFPLWPPMGPFPPVPPPPSSGEAVAPPSTSAAALSRPSGAATTTAAGTSATAASATASGPGSGSAPEAGPAPGFPFPPPWMGMPLPPPFAFPPMPVPPAGFAGLTPEEYELWRXMSGRTGGPVXX

SEQ ID NO: 809 - protein, 191 aa, Homo sapiens
  SITE (18): Xaa equals any of the naturally occurring L-amino acids
  SITE (21): Xaa equals any of the naturally occurring L-amino acids
MFRTAVMMAASIWPRLWXCPXGWPCPWFPLPSSLDGYAPASTLCLPPNACAPCGFAGLTPEELRALEGHERQHLEARLQSLRNIHTLLDAAMLQINQYLTVLASLGPPRPATSVNSTEETATTVVAAASSTSIPSSEATTPTPGASPPAPEMERPPAPESVGTEEMPEDGEPDAAELRRRRLQKLESPVAH

SEQ ID NO: 810 - protein, 617 aa, Homo sapiens
MFRTAVMMAASLALTGAVVAHAYYLKHQFYPTVVYLTKSSPSMAVLYIQAFVLVFLLGKVMGKVFFGQLRAAEMEHLLERSWYAVTETCLAFTVFRDDFSPRFVALFTLLLFLKCFHWLAEDRVDFMERSPNISWLFHCRIVSLMFLLGILDFLFVSHAYHSILTRGASVQLVFGFEYAILMTMVLTIFIKYVLHSVDLQSENPWDNKAVYMLYTELFTGFIKVLLYMAFMTIMIKVHTFPLFAIRPMYLAMRQFKKAVTDAIMSRRAIRNMNTLYPDATPEELQAMDNVCIICREEMVTGAKRLPCNHIFHTSCLRSWFQRQQTCPTCRMDVLRASLPAQSPPPPEPADQGPPPAPHPPPLLPQPPNFPQGLLPPFPPGMFPLWPPMGPFPPVPPPPSSGEAVAPPSTSAAALSRPSGAATTTAAGTSATAASATASGPGSGSAPEAGPAPGFPFPPPWMGMPLPPPFAFPPMPVPPAGFAGLTPEELRALEGHERQHLEARLQSLRNIHTLLDAAMLQINQYLTVLASLGPPRPATSVNSTEETATTVVAAASSTSIPSSEATTPTPGASPPAPEMERPPAPESVGTEEMPEDGEPDAAELRRRRLQKLESPVAH

SEQ ID NO: 811 - protein, 20 aa, Homo sapiens
MNVRLVLNPFPLYSVYVIPN

SEQ ID NO: 812 - protein, 11 aa, Homo sapiens
LEILVVKKLLA

SEQ ID NO: 813 - protein, 20 aa, Homo sapiens
MNVRLVLNPFPLYSVYVIPN

SEQ ID NO: 814 - protein, 62 aa, Homo sapiens
MLCPALGPFLLFLLSSTLMASFMGDTPCHPGELSAFGVAPSRVFTSSFLFTVFTPSYPSLPG

SEQ ID NO: 815 - protein, 62 aa, Homo sapiens; identical to SEQ ID NO: 814

SEQ ID NO: 816 - protein, 51 aa, Homo sapiens
QASWVWWLTTVIPALWEARAGGSLEPRSSRLAWATQKVFISKKKKKKKRAA

SEQ ID NO: 817 - protein, 19 aa, Homo sapiens [sequence omitted]

SEQ ID NO: 818 - protein, 4 aa, Homo sapiens
FLSS

SEQ ID NO: 819 - protein, 53 aa, Homo sapiens
MFISLFIFGLVRLWPCCVVIYFVYSICKHQCSQEAHSSIFNCKFVSQSQFSIM

SEQ ID NO: 820 - protein, 53 aa, Homo sapiens; identical to SEQ ID NO: 819

SEQ ID NO: 821 - protein, 283 aa, Homo sapiens
MIFLLLMLSLELQLHQIAALFTVTVPKELYIIEHGSNVTLECNFDTGSHVNLGAITASLQKVENDTSPHRERATLLEEQLPLGKASFHIPQVQVRDEGQYQCIIIYGVAWDYKYLTLKVKASYRKINTHILKVPETDEVELTCQATGYPLAEVSWPNVSVPANTSHSRTPEGLYQVTSVLRLKPPPGRNFSCVFWNTHVRELTLASIDLQSQMEPRTHPTWLLHIFIPSCIIAFIFIATVIALRKQLCQKLYSSKDTTKRPVTTTKREVNSAVNLNLWSWEPG

SEQ ID NO: 822 - protein, 93 aa, Homo sapiens
  SITE (89): Xaa equals any of the naturally occurring L-amino acids
  SITE (92): Xaa equals any of the naturally occurring L-amino acids
MIFLLLMLSLELQLHQIAALFTVTVPKELYIIEHGSNVTLECNFDTGSHVNLGAITASLQKVENDTSPHRERATLLEEQLPLGKASFPXLKXK

SEQ ID NO: 823 - protein, 23 aa, Homo sapiens
LFLLLEISTHLCFWKSLRKLEGK

SEQ ID NO: 824 - protein, 46 aa, Homo sapiens
MPWLKSLLHFSLFLVVFSTLAVKSLGVPVAAGSPFCIVDVLHFILL

SEQ ID NO: 825 - protein, 46 aa, Homo sapiens; identical to SEQ ID NO: 824

SEQ ID NO: 826 - protein, 67 aa, Homo sapiens [sequence omitted]

SEQ ID NO: 827 - protein, 83 aa, Homo sapiens
GHVLAYSSWPSLAPGLSVQYFVSRVEVPNPGCTLEAPGKLSEFLRPEPHPKPISSESLGGTEPGFCQLKPAMVTSVSSYTENS

SEQ ID NO: 828 - protein, 67 aa, Homo sapiens [sequence omitted]

SEQ ID NO: 829 - protein, 83 aa, Homo sapiens; identical to SEQ ID NO: 827

SEQ ID NO: 830 - protein, 66 aa, Homo sapiens
  SITE (9): Xaa equals any of the naturally occurring L-amino acids
SWVDFDCVXEVSYLNSGSYSLVLHLEGLHPLELSGKLAIDFGKKREFCVDGVGGATLVICPGFQDF

SEQ ID NO: 831 - protein, 61 aa, Homo sapiens
  SITE (13): Xaa equals any of the naturally occurring L-amino acids
MWYVCACVCVCVXVCSYNRRTGKVRTQNNEDLLKCGGGVCVCVFIEQEDRKGNDHPWKMKG

SEQ ID NO: 832 - protein, 11 aa, Homo sapiens
VCCCLHLNAFV

SEQ ID NO: 833 - protein, 716 aa, Homo sapiens
MNNFRATILFWAAAAWAKSGKPSGEMDEVGVQKCKNALKLPVLEVLPGGGWDNLRNVDMGRVMELTYSNCRTTEDGQYIIPDEIFTIPQKQSNLEMNSEILESWANYQSSTSYSINTELSLFSKVNGKFSTEFQRMKTLQVKDQAITTRVQVRNLVYTVKINPTLELSSGFRKELLDISDRLENNQTRMATYLAELLVLNYGTHVTTSVDAGAALIQEDHLRASFLQDSQSSRSAVTASAGLAFQNTVNFKFEENYTSQNVLTKSYLSNRTNSRVQSIGGVPFYPGITLQAWQQGITNHLVAIDRSGLPLHFFINPNMLPDLPGPLVKKVSKTVETAVKRYYTFNTYPGCTDLNSPNFNFQANTDDGSCEGKMTNFSFGGVYQECTQLSGNRDVLLCQKLEQKNPLTGDFSCPSGYSPVHLLSQIHEEGYNHLECHRKCTLLVFCKTVCEDVFQVAKAEFRAFWCVASSQVPENSGLLFGGLFSSKSINPMTNAQSCPAGYFPLRLFENLKVCVSQDYELGSRFAVPFGGFFSCTVGNPLVDPAISRDLGAPSLKKCPGGFSQHPALISDGCQVSYCVKSGLFTGGSLPPARLPPFTRPPLMSQAATNTVIVTNSENARSWIKDSQTHQWRLGEPIELRRAMNVIHGDGGGLSGGAAAGVTVGVTTILAVVITLAIYGTRKFKKKAYQAIEERQSLVPGTAATGDTTYQEQGQSPA

SEQ ID NO: 834 - protein, 94 aa, Homo sapiens
LAVIMARPAAEPLCFLNPKLLALAVGVLELLGRGFLDSSPLLRPASDGERFTWEALGESLPFSDTFASSVFPVPGVFSAPAGAEAFVLGMVMPT

SEQ ID NO: 835 - protein, 39 aa, Homo sapiens
MHLLPWRAAAAPPLLIAVPPRPSRSPVQPPSLGAANPSA

SEQ ID NO: 836 - protein, 9 aa, Homo sapiens
PSAAASATP

SEQ ID NO: 837 - protein, 63 aa, Homo sapiens
  SITE (12): Xaa equals any of the naturally occurring L-amino acids
  SITE (16): Xaa equals any of the naturally occurring L-amino acids
  SITE (20): Xaa equals any of the naturally occurring L-amino acids
  SITE (23): Xaa equals any of the naturally occurring L-amino acids
  SITE (25): Xaa equals any of the naturally occurring L-amino acids
  SITE (35): Xaa equals any of the naturally occurring L-amino acids
  SITE (38): Xaa equals any of the naturally occurring L-amino acids
  SITE (48): Xaa equals any of the naturally occurring L-amino acids
  SITE (49): Xaa equals any of the naturally occurring L-amino acids
MHLLPWRAAAAXPLLXAVPXRAXRXPVQAPSLGAXNPXRGTQVATVSXXSGKLLGLKAPRPKP

SEQ ID NO: 838 - protein, 84 aa, Homo sapiens
TYSFCVCERAFVFGSVPRAEVEQGCTYHGKGGRKENWIACDLWWNLFLLPRPFRPCLISVGHFRLWQGRAGLQSEVPASSLEHN

SEQ ID NO: 839 - protein, 77 aa, Homo sapiens
  SITE (8): Xaa equals any of the naturally occurring L-amino acids
  SITE (9): Xaa equals any of the naturally occurring L-amino acids
  SITE (10): Xaa equals any of the naturally occurring L-amino acids
  SITE (16): Xaa equals any of the naturally occurring L-amino acids
LGGYALSXXXNRVTDXVMIYFFIIIVEYFYGKIFVVLIIPIKIMPNTKYEFYDVHFVLGIKRKKHTSWKSVSCFLLL

SEQ ID NO: 840 - protein, 184 aa, Homo sapiens
MSRTAYTVGALLLLLGTLLPAAEGKKKGSQGAIPPPDKAQHNDSEQTQSPQQPGSRNRGRGQGRGTAMPGEEVLESSQEALHVTERKYLKRDWCKTQPLKQTIHEEGCNSRTIINRFCYGQCNSFYIPRHIRKEEGSFQSCSFCKPKKFTTMMVTLNCPELQPPTKKKRVTRVKQCRCISIDLD

SEQ ID NO: 841 - protein, 87 aa, Homo sapiens
  SITE (1): Xaa equals any of the naturally occurring L-amino acids
  SITE (26): Xaa equals any of the naturally occurring L-amino acids
XHSHWEGLKLCCLNPVLGPARKRKRXLRNRGARGGCRCHSRAALHPHPHASCFTAHSVTELVALGTGGHPHTLMPTAEGRATHPSRD

SEQ ID NO: 842 - protein, 77 aa, Homo sapiens
FVLLHCLNSHLHLALQFPLNTLSSPLVCCQSAALPIKACINYICPMFTFIKHFPCTPVPTSQQTRERAVQLMSLPSF

SEQ ID NO: 843 - protein, 41 aa, Homo sapiens
MAFPRVGAFLFLASLSSLLHCRLLAEAVSGRSVSLAPSIIR

SEQ ID NO: 844 - protein, 164 aa, Homo sapiens
  SITE (3): Xaa equals any of the naturally occurring L-amino acids
  SITE (95): Xaa equals any of the naturally occurring L-amino acids
RMXCSQPPRCHFQSDFQKCAPCPRAQTHWLEPPGRVQTISSMRNAQKGFADSIRLWRLPASGVGWVVSPPIQTQEVAPEGMYLVGSSSGTLGGCXALTQYFSLSPLWGACVRARVLAYAFLCGHIRMPLGEHVHVSPPERACVCAPLRPRFGRLGFGVPVFCPP

SEQ ID NO: 845 - protein, 80 aa, Homo sapiens
  SITE (25): Xaa equals any of the naturally occurring L-amino acids
MGTSTAWRVPWRRWARVRCWWLWPXTGTAEPPGTAGWQGLAGGRCREAWGSLLMGMFGLCFLPVHSQSCLSSSSSPTPRP

SEQ ID NO: 846 - protein, 53 aa, Homo sapiens
  SITE (4): Xaa equals any of the naturally occurring L-amino acids
  SITE (10): Xaa equals any of the naturally occurring L-amino acids
  SITE (27): Xaa equals any of the naturally occurring L-amino acids
IGPXGPRNSXTGGAFLDFSAQAKKKKXQFLKIFFPGLCKSLIYGIFVMQRNTL

SEQ ID NO: 847 - protein, 50 aa, Homo sapiens [sequence omitted]

SEQ ID NO: 848 - protein, 86 aa, Homo sapiens
  SITE (3): Xaa equals any of the naturally occurring L-amino acids
  SITE (5): Xaa equals any of the naturally occurring L-amino acids
  SITE (6): Xaa equals any of the naturally occurring L-amino acids
KKXPXXLSGSKAIASKTKEIEQVYRQDCETFGMVVKMLIEKDPSLEKSIQFALRQNLHEIGERCVEELKHFIAEYDTSTQDFGEPF

SEQ ID NO: 849 - protein, 129 aa, Homo sapiens
RKVEGGASGLNGFPNHPSSLGPAWFPPLPLPSTLSRTGLMKALPKISPTPNFPLPPTFPTSSTTLFGATAGPEAQSAVSQAFVHLSPQSISVLGESHTETQEHPLPELREVLSLRGGLSAVCNNVVLFI

SEQ ID NO: 850 - protein, 48 aa, Homo sapiens
  SITE (45): Xaa equals any of the naturally occurring L-amino acids
  SITE (46): Xaa equals any of the naturally occurring L-amino acids
  SITE (48): Xaa equals any of the naturally occurring L-amino acids
MVQRLWVSRLLRHRKAQLLLVNLLTFGLEVCLAAGFTYVPLCCGXXVX

SEQ ID NO: 851 - protein, 12 aa, Homo sapiens
ILQRRKQRLLRG

SEQ ID NO: 852 - protein, 371 aa, Homo sapiens
  SITE (20): Xaa equals any of the naturally occurring L-amino acids
MLFPSFSRSLVPLPHALYLXQPLTHTTSLLAGIGPVLGLVCVPLLGSASDHWRGRYGRRRPFIWALSLGILLSLFLIPRAGWLAGLLCPDPRPLELALLILGVGLLDFCGQVCFTPLEALLSDLFRDPDHCRQAYSVYAFMISLGGCLGYLLPAIDWDTSALAPYLGTQEECLFGLLTLIFLTCVAATLLVAEEAALGPTEPAEGLSAPSLSPHCCPCRARLAFRNLGALLPRLHQLCCRMPRTLRRLFVAELCSWMALMTFTLFYTDFVGEGLYQGVPRAEPGTEARRHYDEGKALAASRGWCGSRPPETTLGAVSGLVPLHPGPDFSVRKVGMDPICIHGFSWVWNISACGFRKASGCSRSLIRVVAPV

SEQ ID NO: 853 - protein, 75 aa, Homo sapiens
MGPLWGAPLRAWAAGSVGCPCCLSCASPSSISSAGDPLASCSTCGSTWEIPLTWMTMDHLLVRYYLSQARWCTTG

SEQ ID NO: 854 - protein, 57 aa, Homo sapiens
ISYHHVKASHLKIKIQISLKPEVLVPLHCLPLSPTPREESGGFLFSIAIAAVGFLVQ

SEQ ID NO: 855 - protein, 10 aa, Homo sapiens
WASMSSVFGL

SEQ ID NO: 856 - protein, 5 aa, Homo sapiens
SFATC

SEQ ID NO: 857 - protein, 73 aa, Homo sapiens
MWLPAWAAIETFSTCSSLSLSFQPRWALASEGCAGSYVTTHRALGAHLWPLWSDQFLGKGLGLRIPFITHAHQ

SEQ ID NO: 858 - protein, 36 aa, Homo sapiens
  SITE (17): Xaa equals any of the naturally occurring L-amino acids
MAGEEMAWGARLWIMCXLLFLAASEGIMPRLRASAW

SEQ ID NO: 859 - protein, 352 aa, Homo sapiens
VSLLLWGISIRGADACADAHLFCKECLIRYAQEAVFGSGKLELSCMEGSCTCSFPTSELEKVLPQTILYKYYERKAEEEVAAAYADELVRCPSCSFPALLDSDVKRFSCPNPHCRKETCRKCQGLWKEHNGLTCEELAEKDDIKYRTSIEEKMTAARIRKCHKCGTGLIKSEGCNRMSCRCGAQMCYLCRVSINGYDHFCQHPRSPGAPCQECSRCSLWTDPTEDDEKLIEEIQKEAEEEQKRKNGENTFKRIGPPLEKPVEKVQRVEALPRPVPQNLPQPQMPPYAFAHPPFPLPPVRPVFNNFPLNMGPIPAPYVPPLPNVRVNYDFGPIHMPLEHNLPMHFGPQPRHRF

SEQ ID NO: 860 - protein, 63 aa, Homo sapiens
MITFLPIIFSILVVVTFVIGNFANGFIALVNSTEWVKRQKISFADQIVTALAVSRVGLLWVLL

SEQ ID NO: 861 - protein, 8 aa, Homo sapiens
LTMLFNVI

SEQ ID NO: 862 - protein, 7 aa, Homo sapiens
TYIHFLD

SEQ ID NO: 863 - protein, 53 aa, Homo sapiens
  SITE (35): Xaa equals any of the naturally occurring L-amino acids
TEEFKYAVSCNCGTAAWVRVRERERKREKKKKKRXAALEDPSRGPSLRVHATS

SEQ ID NO: 864 - protein, 22 aa, Homo sapiens
LVLFITLLPGKLAHSWHTVNVQ

SEQ ID NO: 865 - protein, 2 aa, Homo sapiens
GC

SEQ ID NO: 866 - protein, 40 aa, Homo sapiens
MILYICLLLKIWGCSLPCNFSFPLDLRKVMDFQFVQHFFL

SEQ ID NO: 867 - protein, 7 aa, Homo sapiens
SFCMGTM

SEQ ID NO: 868 - protein, 86 aa, Homo sapiens
  SITE (2): Xaa equals any of the naturally occurring L-amino acids
  SITE (25): Xaa equals any of the naturally occurring L-amino acids
SXIVGLAIWRGGLCQELPLERFLLXTVFGSDLSLLSGGDLCLELLGGLCLEVCLRGDICLGPLRVSVSELSLLCLSVQGQQKVCPF

SEQ ID NO: 869 - protein, 33 aa, Homo sapiens
KILVSYLMPGMMRIENFSIFMCLTGCLGINFAF

SEQ ID NO: 870 - protein, 288 aa, Homo sapiens
  SITE (87): Xaa equals any of the naturally occurring L-amino acids
  SITE (99): Xaa equals any of the naturally occurring L-amino acids
  SITE (230): Xaa equals any of the naturally occurring L-amino acids
  SITE (263): Xaa equals any of the naturally occurring L-amino acids
  SITE (264): Xaa equals any of the naturally occurring L-amino acids
  SITE (270): Xaa equals any of the naturally occurring L-amino acids
  SITE (275): Xaa equals any of the naturally occurring L-amino acids
MARISFSYLCPASWYFTVPTVSPFLRQRVAFLGLFFISCLLLLMLIIDFRHWSASLPRDRQYERYLARVGELEATDTEDPNLNYGLXVDCGSSGSRIFXYFWPRHNGNPHDLLDIKQMRDRNSQPVVKKIKPGISAMADTPEHASDYLRPLLSFAAAHVPVKKHKETPLYILCTAGMRLLPERKQLAILADLVKDLPLEFDFLFSQSQAEVISGKQEGVYAWIGINFVLXRFDHEDESDAEATQELAAGRRRTVGILDMGGAXXQIAYEXPTFPXKKTPPLFPLLGGI

SEQ ID NO: 871 - protein, 107 aa, Homo sapiens
  SITE (66): Xaa equals any of the naturally occurring L-amino acids
PLGREPLAGFLSFLSFSLLWCLEAFPRLQFLTTLTDFAIVLSPPLSFPKLTLWRLIKRKNHRPGAXLTPRRRANHLRCGVRDQPDQNRETPSLLNNTKLAGRGGARL

SEQ ID NO: 872 - protein, 64 aa, Homo sapiens
  SITE (7): Xaa equals any of the naturally occurring L-amino acids
  SITE (27): Xaa equals any of the naturally occurring L-amino acids
SWVIVVXIWGYLLEGHGVPFCKSYGPXPWKLHTHHAAYNSGSSQVYRILGNSPCPVLIHCSFSG

SEQ ID NO: 873 - protein, 14 aa, Homo sapiens
  SITE (9): Xaa equals any of the naturally occurring L-amino acids
  SITE (14): Xaa equals any of the naturally occurring L-amino acids
WKGLLEGSXEATMX

SEQ ID NO: 874 - protein, 66 aa, Homo sapiens
MSWVIVVIIWGYLLEGHGVPFCKSYGPSPWKLHTHHAAYNSGSSQVYRILETLMSGSTHCSFSGTF

SEQ ID NO: 875 - protein, 90 aa, Homo sapiens
  SITE (31): Xaa equals any of the naturally occurring L-amino acids
  SITE (57): Xaa equals any of the naturally occurring L-amino acids
MPRAPWRIPLCALPTLCLGSPLPSQPTHPIXYDHRAPTWKMAHPGGPRSSHSPRTWXTPSSQTKAALPAGGARNSPLQLCTRSRFCGTPM

SEQ ID NO: 876 - protein, 127 aa, Homo sapiens
MPRAPWRIPLCALPTLCLGSPLPSQPTHPIFYDHRAPTWKMAHPGGPRSSHSPRGPGGHPALRQRLPCRRGEPETALCSSAPGAGFAEPPCKASPGWGPPSRGPQGDRSQGEWLPALGTPCGGPDDS

SEQ ID NO: 877 - protein, 66 aa, Homo sapiens
  SITE (43): Xaa equals any of the naturally occurring L-amino acids
MAGQFRSYVWDPLLILSQIVLMQTVYYGSLGLWLALVDGLVRXAPRWTRCSTPRSWAFPPLQAGSP

SEQ ID NO: 878 - protein, 124 aa, Homo sapiens
  SITE (28): Xaa equals any of the naturally occurring L-amino acids
TQIPTHISRYTPLHSSLGNRARLRLKKXKIKYAYLCPPSLKQLLNYAVINGLSSANYFCLYTKVPQAMLLLASGLSSAFPYDSLGFTLSMLLFFERNKSRVEVLAKEPSAPSSYWDSENRGCQL

SEQ ID NO: 879 - protein, 39 aa, Homo sapiens
MAGQFRSYVWDPLLILSQSSSCRPCITARWACGWRWWTG

SEQ ID NO: 880 - protein, 67 aa, Homo sapiens
MSLCRILGYSFSSRLSSLILPLAVFHYCLSCPLHFKLSFKYLPFPSFPFSSLPCPALPCPALPSPPL

SEQ ID NO: 881 - protein, 86 aa, Homo sapiens
MSLCRILGYSFSSRLSSLILPLAVFHYCLSCPLHFKLSFKYLPFPSFPFSSLPCPALPCPALPSPPLPCPPLPSPPLPLPSLSFFR

SEQ ID NO: 882 - protein, 55 aa, Homo sapiens
MCVGLFLSSVFFHICVHPFANATLSCLLEIGKLCESFNFVLFQIVLAILVPLTFI

SEQ ID NO: 883 - protein, 73 aa, Homo sapiens
TLFVSYQLSNPQYSSFISQNRKLKQREEKLHERFYTAVRSLNWILNLAFWLESPSFYQLCIAVRVDSPWKGKS

SEQ ID NO: 884 - protein, 48 aa, Homo sapiens
  SITE (15): Xaa equals any of the naturally occurring L-amino acids
  SITE (29): Xaa equals any of the naturally occurring L-amino acids
MKPPPLFFFLKIVLXIWGPLWFHMNFRFXFSISMKNAIGILIGIALNL

SEQ ID NO: 885 - protein, 48 aa, Homo sapiens
MKPPPLFFFLKIVLAIWGPLWFHMNFRFVFSISMKNAIGILIGIALNL

SEQ ID NO: 886 - protein, 214 aa, Homo sapiens
  SITE (199): Xaa equals any of the naturally occurring L-amino acids
  SITE (206): Xaa equals any of the naturally occurring L-amino acids
  SITE (214): Xaa equals any of the naturally occurring L-amino acids
MLGARAWLGRVLLLPRAGAGLAASRRCPGVWPRTWPHRSPSRGSSSRDKDRSATVSSSVPMPAGGKGSHPSSTPQRVPNRLIHEKSPYLLQHAYNPVDWYPWGQEAFDKARKENKPIFLSVGYSTCHWCHMMEEESFQNEEIGRLLSEDFVSVKVDREERPDVDKVYMTFVQATSSGGGWPMNVWLTPNLQPFVGGTIXLLKDGLXRVGSAQCX

SEQ ID NO: 887 - protein, 43 aa, Homo sapiens
MLGARAWLGRVLLLPRAGAGLAASRRSACSPTSRLNSLRSLIP

SEQ ID NO: 888 - protein, 802 aa, Homo sapiens [sequence omitted]

SEQ ID NO: 889 - protein, 98 aa, Homo sapiens
MHCCQLPWRCAQAPQEAFLLCLLFLILVLVLLGCSRGLPGHTPWRLHPAAAALLAPLLHDALGACGFQGPEYLLPCLLPLPKPGQLQGPWGPLWALLP

SEQ ID NO: 890 - protein, 25 aa, Homo sapiens
  SITE (9): Xaa equals any of the naturally occurring L-amino acids
CAVRFREQXAPERVFLPTRGRKSEP

SEQ ID NO: 891 - protein, 22 aa, Homo sapiens
LPRPCAPSPVWRQVGREEASLL

SEQ ID NO: 892 - protein, 98 aa, Homo sapiens; identical to SEQ ID NO: 889

SEQ ID NO: 893 - protein, 99 aa, Homo sapiens [sequence omitted]

SEQ ID NO: 894 - protein, 89 aa, Homo sapiens
MKPATASALLLLLLGLAWTQGSHGWGADASSLQKRAGRADQVSLCPQVTLQGPWSPLALLPGLGNLKFSFTPPFNGFLSRVQDGRRWQL

SEQ ID NO: 895 - protein, 73 aa, Homo sapiens
MAGNIQAVETGYVLICLIVPLLLCGLREGQEVPFDVNKAKYLPTFLKKKKKKKKKKKKKKKKKKKKKKKKKKI

SEQ ID NO: 896 - protein, 72 aa, Homo sapiens
MAGNIQAVETGYVLICLIVPLLLCGLREGQEVPFDVNKAKYLPTFLKKKKKKKKKKKKKKKKKKKKKKKKKK

SEQ ID NO: 897 - protein, 29 aa, Homo sapiens
  SITE (26): Xaa equals any of the naturally occurring L-amino acids
  SITE (29): Xaa equals any of the naturally occurring L-amino acids
MYVWVSGALVLVLSPHPASRTLCLMXQAX

SEQ ID NO: 898 - protein, 80 aa, Homo sapiens
PHCASRAVPYPPGPAAAAFPRQGLQLATTCGHSSDPACFGQCPCHLCANHPGYLWSYRVHLSPQPHLHPPQHLLPPHCTL

SEQ ID NO: 899 - protein, 29 aa, Homo sapiens
MYVWVSGALVLVLSPHPASRTLCLMAQAV

SEQ ID NO: 900 - protein, 53 aa, Homo sapiens [sequence omitted]

SEQ ID NO: 901 - protein, 46 aa, Homo sapiens
MRIPVFPKQLMFTGLVFLLLLSKDEGIHNRLSLENTNDGQLFGVIK

SEQ ID NO: 902 - protein, 19 aa, Homo sapiens
  SITE (7): Xaa equals any of the naturally occurring L-amino acids
  SITE (11): Xaa equals any of the naturally occurring L-amino acids
MPFTLGXTRRXRGLAKKPK

SEQ ID NO: 903 - protein, 531 aa, Homo sapiens
MLCALLLLPSLLGATRASPTSGPQECAKGSTVWCQDLQTAARCGAVGYCQGAVWNKPTAKSLPCDVCQDIAAAAGNGLNPDATESDILALVMKTCEWLPSQESSAGCKWMVDAHSSAILSMLRGAPDSAPAQVCTALSLCEPLQRHLATLRPLSKEDTFEAVAPFMANGPLTFHPRQAPEGALCQDCVRQVSRLQEAVRSNLTLADLNIQEQCESLGPGLAVLCKNYLFQFFVPADQALRLLPPQELCRKGGFCEELGAPARLTQVVAMDGVPSLELGLPRKQSEMQMKAGVTCEVCMNVVQKLDHWLMSNSSELMITHALERVCSVMPASITKECIILVDTYSPSLVQLVAKITPEKVCKFIRLCGNRRRARAVHDAYAIVPSPEWDAENQGSFCNGCKRLLTVSSHNLESKSTKRDILVAFKGGCSILPLPYMIQCKHFVTQYEPVLIESLKDMMDPVAVCKKVGACHGPRTPLLGTDQCALGPSFWCRSQEAASCATLCNTARSMYGKRCTSTLGNTRDRGCQRPRAC

SEQ ID NO: 904 - protein, 498 aa, Homo sapiens
  SITE (11): Xaa equals any of the naturally occurring L-amino acids
  SITE (20): Xaa equals any of the naturally occurring L-amino acids
  SITE (398): Xaa equals any of the naturally occurring L-amino acids
EALGGRCLWEXPVTFTVHFXDNSGDVFHAHSSVLNFATNRDDFVQIGKGPTNNTCVVRTVSVGLTLLRVWDAEHPGLSDFMPLPVLQAISPELSGAMVVGDVLCLATVLTSLEGLSGTWSSSANSILHIDPKTGVAVARAVGSVTVYYEVAGHLRTYKEVVVSVPQRIMARHLHPIQTSFQEATASKVIVAVGDRSSNLRGECTPTQREVIQALHPETLISCQSQFKPAVFDFPSQDVFTVEPQFDTALGQYFCSITMHRLTDKQRKHLSMKKTALVVSASLSSSHFSTEQVGAEVPFSPGLFADQAEILLSNHYTSSEIRVFGAPEVLENLEVKSGSPAVLAFAKEKSFGWPSFITYTVGVLDPAAGSQGPLSTTLTFSSPVTNQAIAIPVTVAFVXDRRGPGPYGASLFQHFLDSYQVMFFTLFALLAGTAVMIIAYHTVCTPRDLAVPAALTPRASPGHSPHYFAASSPTSPNALPPARKASPPSGLWSPAYASH

SEQ ID NO: 905 - protein, 886 aa, Homo sapiens
  SITE (26): Xaa equals any of the naturally occurring L-amino acids
  SITE (216): Xaa equals any of the naturally occurring L-amino acids
  SITE (234): Xaa equals any of the naturally occurring L-amino acids
  SITE (275): Xaa equals any of the naturally occurring L-amino acids
  SITE (871): Xaa equals any of the naturally occurring L-amino acids
MAARGRGLLLLTLSVLLAAGPSAAAXKLNIPKVLLPFTRATRVNFTLEASEGCYRWLSTRPEVASIEPLGLDEQQCSQKAVVQARLTQPARLTSIIFAEDITTGQVLRCDAIVDLIHDIQIVSTTRELYLEDSPLELKIQALDSEGNTFSTLAGLVFEWTIVKDSEADRFSDSHNALRILTFLESTYIPPSYISEMEKAAKQGDTILVSGMKTGSXKLKARIQEAVYKNVRPAXVRLLILENILLNPAYDVYLMVGTSIHYKVQKIRQGKITELXMPSDQYELQLQNSIPGPEGDPTRPVAVLAQDTSMVTALQLGQSSLVLGHRSIRMQGASRLPNSTIYVVEPGYLGFTVHPGDRWVLETGRLYEITIEVFDKFSNKVYVSDNIRIETVLPAEFFEVLSSSQNGSYHRIRALKRGQTAIDAALTSVVDQDGGVHILQVPVWNQQEVEIHIPITLYPSILTFPWQPKTGAYQYTIRAHGGSGNFSWSSSSHLVATVTVKGVMTTGSDIGFSVIQAHDVQNPLHFGEMKVYVIEPHSMEFAPCQVEARVGQALELPLRISGLMPGGASEVVTLSDCSHFDLAVEVENQGVFQPLPGRLPPGSEHCSGVRVKAEAQGSTTLLVSYRHGHVHLSAKITIAAYLPLKAVDPSSVALVTLGSSKEMLFEGGPRPWILEPSKFFQNVTAEDTDSIGLALFAPHSSRNYQQHWILVTCQALGEQVIALSVGNKPSLTNPFPAVEPAVVKFVCAPPSRLTLVPVYTSPQLDMSCPLLQQNKQVVPVSSHRNPLLDLAAYDQEGRRFDNFSSLSIQWESTRPVLASIEPELPMQLVSQDDESGQKKLHGLQAILVHEASGTTASLPLPLATRSPTSALXEQSSRMTLWCLCRPP

SEQ ID NO: 906 - protein, 1887 aa, Homo sapiens
MAARGRGLLLLTLSVLLAAGPSAAAAKLNIPKVLLPFTRATRVNFTLEASEGCYRWLSTRPEVASIEPLGLDEQQCSQKAVVQARLTQPARLTSIIFAEDITTGQVLRCDAIVDLIHDIQIVSTTRELYLEDSPLELKIQALDSEGNTFSTLAGLVFEWTIVKDSEADRFSDSHNALRILTFLESTYIPPSYISEMEKAAKQGDTILVSGMKTGSSKLKARIQEAVYKNVRPAEVRLLILENILLNPAYDVYLMVGTSIHYKVQKIRQGKITELSMPSDQYELQLQNSIPGPEGDPTRPVAVLAQDTSMVTALQLGQSSLVLGHRSIRMQGASRLPNSTIYVVEPGYLGFTVHPGDRWVLETGRLYEITIEVFDKFSNKVYVSDNIRIETVLPAEFFEVLSSSQNGSYHRIRALKRGQTAIDAALTSVVDQDGGVHILQVPVWNQQEVEIHIPITLYPSILTFPWQPKTGAYQYTIRAHGGSGNFSWSSSSHLVATVTVKGVMTTGSDIGFSVIQAHDVQNPLHFGEMKVYVIEPHSMEFAPCQVEARVGQALELPLRISGLMPGGASEVVTLSDCSHFDLAVEVENQGVFQPLPGRLPPGSEHCSGVRVKAEAQGSTTLLVSYRHGHVHLSAKITIAAYLPLKAVDPSSVALVTLGSSKEMLFEGGPRPWILEPSKFFQNVTAEDTDSIGLALFAPHSSRNYQQHWILVTCQALGEQVIALSVGNKPSLTNPFPAVEPAVVKFVCAPPSRLTLVPVYTSPQLDMSCPLLQQNKQVVPVSSHRNPLLDLAAYDQEGRRFDNFSSLSIQWESTRPVLASIEPELPMQLVSQDDESGQKKLHGLQAILVHEASGTTAITATATGYQESHLSSARTKQPHDPLVPLSASIELILVEDVRVSPEEVTIYNHPGIQAELRIREGSGYFFLNTSTADVVKVAYQEARGVAMVHPLLPGSSTIMIHDLCLVFPAPAKAVVYVSDIQELYIRVVDKVEIGKTVKAYVRVLDLHKKPFLAKYFPFMDLKLRAASPIITLVALDEALDNYTITFLIRGVAIGQTSLTASVTNKAGQRINSAPQQIEVFPPFRLMPRKVTLLIGATMQVTSEGGPQPQSNILFSISNESVALVSAAGLVQGLAIGNGTVSGLVQAVDAETGKVVIISQDLVQVEVLLLRAVRIRAPIMRMRTGTQMPIYVTGITNHQNPFSFGNAVPGLTFHWSVTKRDVLDLRGRHHEASIRLPSQYNFAMNVLGRVKGRTGLRVVVKAVDPTSGQLYGLARELSDEIQVQVFEKLQLLNPEIEAEQILMSPNSYIKLQTNRDGAASLSYRVLDGPEKVPVVHVDEKGFLASGSMIGTSTIGVIAQEPFGANQTIIVAVKVSPVSYLRVSMSPVLHTQNKEALVAVPLGMTVTFTVHFHDNSGDVFHAHSSVLNFATNRDDFVQIGKGPTNNTCVVRTVSVGLTLLRVWDAEHPGLSDFMPLPVLQAISPELSGAMVVGDVLCLATVLTSLEGLSGTWSSSANSILHIDPKTGVAVARAVGSVTVYYEVAGHLRTYKEVVVSVPQRIMARHLHPIQTSFQEATASKVIVAVGDRSSNLRGECTPTQREVIQALHPETLISCQSQFKPAVFDFPSQDVFTVEPQFDTALGQYFCSITMHRLTDKQRKHLSMKKTALVVSASLSSSHFSTEQVGAEVPFSPGLFADQAEILLSNHYTSSEIRVFGAPEVLENLEVKSGSPAVLAFAKEKSFGWPSFITYTVGVLDPAAGSQGPLSTTLTFSSPVTNQAIAIPVTVAFVVDRRGPGPYGASLFQHFLDSYQVMFFTLFALLAGTAVMIIAYHTVCTPRDLAVPAALTPRASPGHSPHYFAASSPTSPNALPPARKASPPSGLWSPAYASH

SEQ ID NO: 907 - protein, 16 aa, Homo sapiens
PLCLALELGWVCLSST

SEQ ID NO: 908 - protein, 302 aa, Homo sapiens
  SITE (262): Xaa equals any of the naturally occurring L-amino acids
  SITE (279): Xaa equals any of the naturally occurring L-amino acids
  SITE (294): Xaa equals any of the naturally occurring L-amino acids
  SITE (295): Xaa equals any of the naturally occurring L-amino acids
MLLLWKNFMYRRRQPVQLLVELLWPLFLFFILVAVRHSHPPLEHHECHFPNKPLPSAGTVPWLQGLICNVNNTCFPQLTPGEEPGRLSNFNDSLVSRLLADARTVLGGASAHRTLAGLGKLIATLRAARSTAQPQPTKQSPLEPPMLDVAELLTSLLRTESLGLALGQAQEPLHSLLEAAEDLAQELLALRSLVELRALLQRPRGTSGPLELLSEALCSVRGPSSTVGPSLNWYEASDLMELVGQEPESACRQQLSPLLGAXWSLDSTRCPLVWNAEAXSSEVLLTDHFTEVMXXERLQSYL

SEQ ID NO: 909 - protein, 37 aa, Homo sapiens
LPWLPFFFSCLVSTLPSMSVSAFSLVVRGRRAFTSVR

SEQ ID NO: 910 - protein, 181 aa, Homo sapiens
  SITE (80): Xaa equals any of the naturally occurring L-amino acids
  SITE (151): Xaa equals any of the naturally occurring L-amino acids
  SITE (162): Xaa equals any of the naturally occurring L-amino acids
PKTSPSPEVSYTTPAPKDVLLPHKPYPEVSQSEPAPLETRGIPFIPMISPSPSQEELQTTLEETDQSTQEPFTTKIPRTXELAKTTQAPHRFYTTVRPRTSDKPHIRPVLNRTTTRPTRPKPSGMPSGNGVGTGVKQAPRPSGADRNVSVXSTHPTKKPGTXRPPLPPSRRGREFPGRRAH

SEQ ID NO: 911 - protein, 161 aa, Homo sapiens
MLSSLGCLLLCGSITLALGNAQKLPKGKRPNLKVHINTTSDSILLKFLRPSPNVKLEGLLLGYGSNVSPNQYFPLPAEGKFTEAIVDAEPKYLIVVRPAPPPSQKKSCSGKTRSRKPLQLVVGTLTPSSVFLSWGFLINPHHDWTLPSHCPNDRFYTIRYR

SEQ ID NO: 912 - protein, 778 aa, Homo sapiens
MLSSLGCLLLCGSITLALGNAQKLPKGKRPNLKVHINTTSDSILLKFLRPSPNVKLEGLLLGYGSNVSPNQYFPLPAEGKFTEAIVDAEPKYLIVVRPAPPPSQKKSCSGKTRSRKPLQLVVGTLTPSSVFLSWGFLINPHHDWTLPSHCPNDRFYTIRYREKDKEKKWIFQICPATETIVENLKPNTVYEFGVKDNVEGGIWSKIFNHKTVVGSKKVNGKIQSTYDQDHTVPAYVPRKLIPITIIKQVIQNVTHKDSAKSPEKAPLGGVILVHLIIPGLNETTVKLPASLMFEISDALKTQLAKNETLALPAESKTPEVEKISARPTTVTPETVPRSTKPTTSSALDVSETTLVLSKRTPETLQTILIPQFELPLSTLAPKSLPEFPEAKTPFPFEKPRGTLASSEKPWIVPTAKISEDSKVLQPQTATYDVFSSPTTSDEPEISDSYTATSDRILDSIPPKTSRTLEQPRATLAPSETPFVPQKLEIFTSPEMQPTTPAPQQTTSIPSTPKRRPRPKPPRTKPERTTSAGTITPKISKSPEPTWTTPAPGKTQFISLKPKIPLSPEVTHTKPAPKQTPRAPPKPKTSPRPRIPQTQPVPKVPQRVTAKPKTSPSPEVSYTTPAPKDVLLPHKPYPEVSQSEPAPLETRGIPFIPMISPSPSQEELQTTLEETDQSTQEPFTTKIPRTTELAKTTQAPHRFYTTVRPRTSDKPHIRPVLNRTTTRPTRPKPSGMPSGNGVGTGVKQAPRPSGADRNVSVDSTHPTKKPGTRRPPLPP

SEQ ID NO: 913 - protein, 132 aa, Homo sapiens
  SITE (70): Xaa equals any of the naturally occurring L-amino acids
SFRTAPRGPHVKESHASGLLSNQINLQSFDFKRMLLCRLNITGLCWGPKRTRCALGGQTGLQHHPSNEKXRHSGKEDLFLSICLGWGTTVNMACNNQRGRGYQTQRNSSPVYQEELLFFCTSLFSRLFSLKG

SEQ ID NO: 914 - protein, 33 aa, Homo sapiens
MNHLSISIALFLLCCVHLSLGLSVFPFQEDRSV

SEQ ID NO: 915 - protein, 102 aa, Homo sapiens [sequence omitted]

SEQ ID NO: 916 - protein, 85 aa, Homo sapiens
IKTVFLGQRYTDPNFIAVVFIHLPIDILKAPARPGTVAHACNLSTLVGRGGRITRSRDQDHPGQRGETLSLLKIQKLAGHGGARL

SEQ ID NO: 917 - protein, 33 aa, Homo sapiens
MISCLCNFIAHCVALVMRTCMLVVSSNFAPSFL

SEQ ID NO: 918 - protein, 33 aa, Homo sapiens; identical to SEQ ID NO: 917

SEQ ID NO: 919 - protein, 101 aa, Homo sapiens [sequence omitted]

SEQ ID NO: 920 - protein, 60 aa, Homo sapiens
MRKWGLMKLIASMMQPVLLELLSVWRKEGRDSRNIHDSHSMYVLRKRLSGSWLQQVCTLL

SEQ ID NO: 921 - protein, 79 aa, Homo sapiens [sequence omitted]

SEQ ID NO: 922 - protein, 245 aa, Homo sapiens
MADVSAKDSSQETLVNLAGLLVSLLMLPLVSGCPGFSLGCFFFLTALHIYANYRAVRALVMETLNEGRLRLVLKHYLQRGEVLDPTAANRMEPLWTGFWPAPSLSLGVPLHRLVSSVFELQQLVEGHQESYLLCWDQSQNQVQVVLNQKAGPKTILRAATHGLMLGALQGDGPLPAELEELRNRVRAGPKKESWVVVKETHEVLDMLFPKFLKGLQDAGWKTEKHQLEVDEWRATWLLSPEKKVL

SEQ ID NO: 923 - protein, 75 aa, Homo sapiens
  SITE (62): Xaa equals any of the naturally occurring L-amino acids
  SITE (63): Xaa equals any of the naturally occurring L-amino acids
LPVQNGCPESAMEMNGRAPCWEVGLEELSSRKLTAGPQFPSEPQAPAPSLFRQCLLWFCGMXXGGVGSPPPLTQE

SEQ ID NO: 924 - protein, 186 aa, Homo sapiens
MLPLVSGCPGFSLGCFFFLTALHIYANYRAVRALVMETLNEGRLRLVLKHYLQRGEVLDPTAANRMEPLWTGFWPAPSLSLGVPLHRLVSSVFELQQLVEGHQESYLLCWDQSQNQVQVVLNQKAGPKTILRAATHGLMLGALQGDGPLPAELEELRNRVRAGPRKRAGSSSRRHTKCWTCCSQSS

SEQ ID NO: 925 - protein, 40 aa, Homo sapiens
MRRQTFMSILVFQCSPISFGLCINKERTVVSSVITDNLCL

SEQ ID NO: 926 - protein, 40 aa, Homo sapiens; identical to SEQ ID NO: 925

SEQ ID NO: 927 - protein, 73 aa, Homo sapiens
  SITE (60): Xaa equals any of the naturally occurring L-amino acids
SLLLSCCPLGNRAYGATGAEVASRASLEGSEHSMQRSHREAGNQGPGRAASCASPAFVMXFSFFTHCQICFLP

SEQ ID NO: 928 - protein, 7 aa, Homo sapiens
EAPWQFS

SEQ ID NO: 929 - protein, 23 aa, Homo sapiens
MFLKAQWLYSLLLNCLLPEGTSS

SEQ ID NO: 930 - protein, 23 aa, Homo sapiens
MFLKAQWLYSLLLNCLLPEGTSS

SEQ ID NO: 931 - protein, 64 aa, Homo sapiens
RTLRMSPSAFCYSLTLLACWRAAWIPTCVPRAAGEMDSPGLADGHWCSGAARRSPHYVARSLVL

SEQ ID NO: 932 - protein, 822 aa, Homo sapiens
MAAAVVVAEGDSDSRPGQELLVAWNTVSTGLVPPAALGLVSSRTSGAVPPKEEELRAAVEVLRGHGLHSVLEEWFVEVLQNDLQANISPEFWNAISQCENSADEPQCLLLLLDAFGLLESRLDPYLRSLELLEKWTRLGLLMGTGAQGLREEVHTMLRGVLFFSTPRTFQEMIQRLYGCFLRVYMQSKRKGEGGTDPELEGELDSRYARRRYYRLLQSPLCAGCSSDKQQCWCRQALEQFHQLSQVLHRLSLLERVSAEAVTTTLHQVTRERMEDRCRGEYERSFLREFHKWIERVVGWLGKVFLQDGPARPASPEAGNTLRRWRCHVQRFFYRIYASLRIEELFSIVRDFPDSRPAIEDLKYCLERTDQRQQLLVSLKAALETRLLHPGVNTCDIITLYISAIKALRVLDPSMVILEVACEPIRRYLRTREDTVRQIVAGLTGDSDGTGDLAVELSKTDPASLETGQDSEDDSGEPEDWVPDPVDADPGKSSSKRRSSDIISLLVSIYGSKDLFINEYRSLLADRLLHQFSFSPEREIRNVELLKLRFGEAPMHFCEVMLKDMADSRRINANIREEDEKRPAEEQPPFGVYAVILSSEFWPPFKDEKLEVPEDIRAALEAYCKKYEQLKAMRTLSWKHTLGLVTMDVELADRTLSVAVTPVQAVILLYFQDQASWTLEELSKAVKMPVALLRRRMSVWLQQGVLREEPPGTFSVIEEERPQDRDNMVLIDSDDESDSGMASQADQKEEELLLFWTYIQAMLTNLESLSLDRIYNMLRMFVVTGPALAEIDLQELQGYLQKKVRDQQLVYSAGVYRLPKNCS

SEQ ID NO: 933 - protein, 157 aa, Homo sapiens
MSPWLLLLLVVGSWLLARILAWTYAFYNNCRRLQCFPQPPKRNWFWGHLGLITPTEEGLKDSTQMSATYSQGFTVWLGPIIPFIVLCHPDTIRSITNASAAIAPKDNLFIRFLKPWLGEYLQVKGVGDNLAGRVGEVLLLPIVLGCPTRRRDTAEWR

SEQ ID NO: 934 - protein, 13 aa, Homo sapiens
LVIGGWGQRRLYR

SEQ ID NO: 935 - protein, 126 aa, Homo sapiens
  SITE (119): Xaa equals any of the naturally occurring L-amino acids
MSPWLLLLLVVGSWLLARILAWTYAFYNNCRRLQCFPQPPKRNWFWGHLGLITPTEEGLKDSTQMSATYSQGFTVWLGPIIPFIVLCHPDTIRSITNASAAIAPKDNLFIRFLKPWLGXRDTAEWR

SEQ ID NO: 936 - protein, 90 aa, Homo sapiens
  SITE (22): Xaa equals any of the naturally occurring L-amino acids
  SITE (25): Xaa equals any of the naturally occurring L-amino acids
  SITE (26): Xaa equals any of the naturally occurring L-amino acids
QNTIECGSSTAGVCCSQLWRLXVQXXGTGRLHVWWGPASWSIASTFSLHPYVVEEAGELSGVSFVTPFLRLVHSHDLITSQRPCLLTPLP

SEQ ID NO: 937 - protein, 58 aa, Homo sapiens [sequence omitted]

SEQ ID NO: 938 - protein, 34 aa, Homo sapiens
LCVSHPGITCTPLWLCVISQNMELILMFRRPKLT

SEQ ID NO: 939 - protein, 6 aa, Homo sapiens
TLTAKT

SEQ ID NO: 940 - protein, 58 aa, Homo sapiens [sequence omitted]

SEQ ID NO: 941 - protein, 44 aa, Homo sapiens
  SITE (3): Xaa equals any of the naturally occurring L-amino acids
LKXITICCLQKTHLHSKGTERMKVKGWERVYWGNITEGNMMNLY

SEQ ID NO: 942 - protein, 9 aa, Homo sapiens
LGAFSWSPK

SEQ ID NO: 943 - protein, 96 aa, Homo sapiens
MARSLLIILGADFTFPTSFNCFQKMNLAKKSRGSFTHLLTHSWCLSLFLKEADQGLRENNFDFSHVCPSKPPLWTDSPSVPGRNWDNPRTFLVPSR

SEQ ID NO: 944 - protein, 96 aa, Homo sapiens; identical to SEQ ID NO: 943

SEQ ID NO: 945 - protein, 26 aa, Homo sapiens
  SITE (3): Xaa equals any of the naturally occurring L-amino acids
  SITE (5): Xaa equals any of the naturally occurring L-amino acids
MLXFXFFLLFFFFFWWCCLAFFSFPF

SEQ ID NO: 946 - protein, 77 aa, Homo sapiens [sequence omitted]

SEQ ID NO: 947 - protein, 77 aa, Homo sapiens [sequence omitted]

SEQ ID NO: 948 - protein, 11 aa, Homo sapiens
MWRWLSSFWLL

SEQ ID NO: 949 - protein, 11 aa, Homo sapiens
MWRWLSSFWLL

SEQ ID NO: 950 - protein, 378 aa, Homo sapiens
AREKPYLVEEAVSYNELDYVSVGLDQQTVKLVCTNRRKQFLLDTADVALAEFFLASLKSAMIKGCREPPYPSILTDATMEKLALAKFVAQESKCEASAVTVRFYGLVHWEDPTDESLGPTPCHCSPPEGTITKEGMLHYKAGTSYLGKEHWKTCFVVLSNGILYQYPDRTDVIPLLSVNMGGEQCGGCRRANTTDRPHAFQVILSDRPCLELSAESEAEMAEWMQHLCQAVSKGVIPQGVAPSPCIPCCLVLTDDRLFTCHEDCQTSFFRSLGTAKLGDISAVSTEPGKEYCVLEFSQDSQQLLPPWVIYLSCTSELDRLLSALNSGWKTIYQVDLPHTAIQEASNKKKFEDALSLIHSAWQRSDSLCRGRASRDPWC

SEQ ID NO: 951 - protein, 134 aa, Homo sapiens
SPARHPTTSSRHTWWESGNAVPPGSPFHGRPLLLLQPAGPVPFQDQPFDPSQGPWPGLHCRPQGLMHSMCLPDLTPEDGGKAQDHTALGHSREQDTPGVQENFQGAAPLDRYTRRFNTLYYLGNQRRGIIKTRK

SEQ ID NO: 952 - protein, 58 aa, Homo sapiens
MATASINNLISSLLLHLSLLSSKAGKFLIWKEHKTACGCYANSTCLLPNGLSNHKGKS

SEQ ID NO: 953 - protein, 58 aa, Homo sapiens; identical to SEQ ID NO: 952

SEQ ID NO: 954 - protein, 63 aa, Homo sapiens
ENKRLHFGEASTLSGLLFCFMSWCLGEDLAGFIQSGRVWAILENVPSISENKSAPSTCLHPGD

SEQ ID NO: 955 - protein, 77 aa, Homo sapiens
MAGLGLLSLVQFSVTGGHWTGIADSLVATLGCRLSGSVPPPLLPAPSGHSRALHQTLTWCLHLLSLSPSSNPWKSLV

SEQ ID NO: 956 - protein, 77 aa, Homo sapiens; identical to SEQ ID NO: 955

SEQ ID NO: 957 - protein, 27 aa, Homo sapiens
MRARTLPPSLLCLWCLAPYLNICWMNG

SEQ ID NO: 958 - protein, 28 aa, Homo sapiens
  SITE (14): Xaa equals any of the naturally occurring L-amino acids
AQWLTPVIPALWWXEEGGSPEVRSSRPA

SEQ ID NO: 959 - protein, 27 aa, Homo sapiens
MRARTLPPSLLCLWCLAPYLNICWMNG

SEQ ID NO: 960 - protein, 13 aa, Homo sapiens
PPRASWSPREHVL

SEQ ID NO: 961 - protein, 70 aa, Homo sapiens
  SITE (2): Xaa equals any of the naturally occurring L-amino acids
  SITE (3): Xaa equals any of the naturally occurring L-amino acids
MXXHESILLVSLDLLPTSILLVSLWICSPPPSSWVNPGSFVGYLERKRQKLICQMTRTNRLFGMKRKTSG

SEQ ID NO: 962 - protein, 53 aa, Homo sapiens
  SITE (47): Xaa equals any of the naturally occurring L-amino acids
SLALNSPPPGLRVPREERLLATSLLQGALPAGPCPSTTLLSWHRPAXPPGAQG

SEQ ID NO: 963 - protein, 65 aa, Homo sapiens
SILLVSLDLLPTSILLVSLWICSPPPSSWVNPGSFVGYLERKRQKLICQMTRTNRLFGMKRKTSG

SEQ ID NO: 964 - protein, 3 aa, Homo sapiens
DLK

SEQ ID NO: 965 - protein, 9 aa, Homo sapiens
MNEKFLPPL

SEQ ID NO: 966 - protein, 51 aa, Homo sapiens
MLRPPRWALMAASSHPPPLWSWVLGLAAHPTGMSPGTGPHHGWVSASSSSS

SEQ ID NO: 967 - protein, 244 aa, Homo sapiens
  SITE (25): Xaa equals any of the naturally occurring L-amino acids
  SITE (40): Xaa equals any of the naturally occurring L-amino acids
  SITE (41): Xaa equals any of the naturally occurring L-amino acids
  SITE (43): Xaa equals any of the naturally occurring L-amino acids
  SITE (231): Xaa equals any of the naturally occurring L-amino acids
  SITE (237): Xaa equals any of the naturally occurring L-amino acids
MRAPFNTLFGRLFGLLLVAIVLAHXLAFFWFHHYGPPPPXXAXFVEQPDGSLTPLRKAPRPWFGGPVVPLTFQFISLIIAAWYGAKLLSRPIQRLSAAAERLSVDLDSPPLVETGPREARQAASTFNLMQKRIREQVSQRARMLGAVSHDLRTPLSRLKLRLEQIEDPKLQGQMRQDLDDMIGMLDATLSYLHEQRTSETRHWLDVQALVESLSENAQDQGRDVQFFFGGXPPGGGXPKTPPPF

SEQ ID NO: 968 - protein, 244 aa, Homo sapiens
  SITE (231): Xaa equals any of the naturally occurring L-amino acids
  SITE (237): Xaa equals any of the naturally occurring L-amino acids
MRAPFNTLFGRLFGLLLVAIVLAHVLAFFWFHHYGPPPPPRAAFVEQPDGSLTPLRKAPRPWFGGPVVPLTFQFISLIIAAWYGAKLLSRPIQRLSAAAERLSVDLDSPPLVETGPREARQAASTFNLMQKRIREQVSQRARMLGAVSHDLRTPLSRLKLRLEQIEDPKLQGQMRQDLDDMIGMLDATLSYLHEQRTSETRHWLDVQALVESLSENAQDQGRDVQFFFGGXPPGGGXPKTPPPF

SEQ ID NO: 969 - protein, 85 aa, Homo sapiens
GIGSRVRAAFIALEPSLGMGFSKNWQAHRLPSKWVRTAYPSIETHYLFYLFLSGSGARCSYFSHLRWDILGQTREILEAISVVNP

SEQ ID NO: 970 - protein, 54 aa, Homo sapiens
  SITE (34): Xaa equals any of the naturally occurring L-amino acids
  SITE (35): Xaa equals any of the naturally occurring L-amino acids
  SITE (46): Xaa equals any of the naturally occurring L-amino acids
MKTVSLLLTLWFSQTFSFNLFFAPPHSLLQSSIXXSVSSITTVHPXLGLLFCIL

SEQ ID NO: 971 - protein, 37 aa, Homo sapiens
ILLGLWQSVLGSSIWGQPLSYNCQEPHNCLFNHSDFK

SEQ ID NO: 972 - protein, 56 aa, Homo sapiens
MKTVSLLLTLWFSQTFSFNLFFAPPHSLLQSSIFFSVSSITTVHPILVFFFAFFRT

SEQ ID NO: 973 - protein, 65 aa, Homo sapiens
KLTQAGSGYVHREIFPRVCFFDILSPSFYLLAGISCPTTPVIICKPLYSFQCLKVIHKEGRNKRV

SEQ ID NO: 974 - protein, 11 aa, Homo sapiens
MTLSNWEYGFH

SEQ ID NO: 975 - protein, 60 aa, Homo sapiens [sequence omitted]

SEQ ID NO: 976 - protein, 24 aa, Homo sapiens
ICLWGRPNLTTQGTLKGISGRRSQ

SEQ ID NO: 977 - protein, 128 aa, Homo sapiens
PETFLLVTGSQWGILGCQGPRVTCVQLFYGSRGLSLRQATKCPGCHPPWSPSVPHAWSPASPRIPVAFISGQLPARPGLGHGLRHEARPPPAPLPRGSSIPLHFWNVCASMMFVYLRHLKIYFRYEGK

SEQ ID NO: 978 - protein, 23 aa, Homo sapiens
ICLWGRPNLTTQGTLKGISGRRS

SEQ ID NO: 979 - protein, 78 aa, Homo sapiens
RHLQVGGGQHQCGQACLDSSYRPLLCMMWEPGHSHAPSRAQGCGSTTEHPLSHCPPLPRALPSPPLLHHSSFKVPLLY

SEQ ID NO: 980 - protein, 98 aa, Homo sapiens
  SITE (72): Xaa equals any of the naturally occurring L-amino acids
MPLQRRVKVKTTSSRCLPGTTWGLTLFSMLCCFWPLGIAAFYFSQGTSKAISKGDFRLASTTSRRALFLATXAIAVGAGLYVAVVVALAAYMSQNGHG

SEQ ID NO: 981 - protein, 68 aa, Homo sapiens
MPLQRRVKVKTTSSRCLPGTTWDLLSSPCSAASGHWALLPSTSPRGPARPSPKGTSAWPAPPPAGPSS

SEQ ID NO: 982 - protein, 68 aa, Homo sapiens
  SITE (25): Xaa equals any of the naturally occurring L-amino acids
  SITE (51): Xaa equals any of the naturally occurring L-amino acids
  SITE (56): Xaa equals any of the naturally occurring L-amino acids
MLLPLFTLLILLLRVFPKEIIQNRXKLKAEKCWNMTLFIAVGKMGGWGTWXMLEIXALCEGPVGEDAL

SEQ ID NO: 983 - protein, 8 aa, Homo sapiens
RVFPVTTL

SEQ ID NO: 984 - protein, 32 aa, Homo sapiens
MLLPLFTLLILLLRVFPKEIIQNRKKLKAEKC

SEQ ID NO: 985 - protein, 10 aa, Homo sapiens
MGLFLFLVSS

SEQ ID NO: 986 - protein, 10 aa, Homo sapiens
MGLFLFLVSS

SEQ ID NO: 987 - protein, 56 aa, Homo sapiens
MLTGVISGSTGAMALSLASLSAHCFAFRCLAAPFYFFAGLGKHGRRILISFLFSAW

SEQ ID NO: 988 - protein, 56 aa, Homo sapiens; identical to SEQ ID NO: 987

SEQ ID NO: 989 - protein, 56 aa, Homo sapiens
  SITE (3): Xaa equals any of the naturally occurring L-amino acids
  SITE (46): Xaa equals any of the naturally occurring L-amino acids
AEXAPLHFHLGDGERLHLKKKKNKKKKPKQGWARWLTPVISALLEXGAGVSPEVMS

SEQ ID NO: 990 - protein, 29 aa, Homo sapiens
MLVIIIMTALVSHVPSVHSVPHAVPFTSS

SEQ ID NO: 991 - protein, 29 aa, Homo sapiens
MLVIIIMTALVSHVPSVHSVPHAVPFTSS

SEQ ID NO: 992 - protein, 60 aa, Homo sapiens
  SITE (7): Xaa equals any of the naturally occurring L-amino acids
  SITE (34): Xaa equals any of the naturally occurring L-amino acids
VFKTIRXREIILYHENSTGKTHPHDSLISHWVPXTTQGNYGSYKMRFGWGHRARPYQPPK

SEQ ID NO: 993 - protein, 53 aa, Homo sapiens
  SITE (28): Xaa equals any of the naturally occurring L-amino acids
MDIQGKALYIRFLLTLCQMVVSVMGKRXQGRRGLGGAAAVGREICRRWGCCVT

SEQ ID NO: 994 - protein, 12 aa, Homo sapiens
LCWTRSSVIGAH

SEQ ID NO: 995 - protein, 53 aa, Homo sapiens
MDIQGKALYIRFLLTLCQMVVSVMGKRRQGRRGLGGAAAVGREICRRWGCCVT

SEQ ID NO: 996 - protein, 53 aa, Homo sapiens
  SITE (21): Xaa equals any of the naturally occurring L-amino acids
KQGSLLGWSRVIMVRGAQSYXKGVLCRHWKKFGFYSKWNWKPLECFQNRSDVI

SEQ ID NO: 997 - protein, 53 aa, Homo sapiens
MRLILFAMSPKLLFLFLFLYISVKSFDLVLSFRSVLFMSDLIHCFYHQLHFKL

SEQ ID NO: 998 - protein, 53 aa, Homo sapiens; identical to SEQ ID NO: 997

SEQ ID NO: 999 - protein, 79 aa, Homo sapiens
  SITE (34): Xaa equals any of the naturally occurring L-amino acids
LGIWLIPGLRRANPKISLEYLMVPENKYSKNCEXMLKGLRSQPEGAANGQSWNNSNKVNKYSIGLLLNKCMIHESTLKD

SEQ ID NO: 1000 - protein, 43 aa, Homo sapiens
MFHRFFILSALSRIRALTTFLDDLGMTHQTLLLLLGPSIYSFC

SEQ ID NO: 1001 - protein, 43 aa, Homo sapiens; identical to SEQ ID NO: 1000

SEQ ID NO: 1002 - protein, 111 aa, Homo sapiens
  SITE (45): Xaa equals any of the naturally occurring L-amino acids
  SITE (99): Xaa equals any of the naturally occurring L-amino acids
  SITE (104): Xaa equals any of the naturally occurring L-amino acids
  SITE (108): Xaa equals any of the naturally occurring L-amino acids
  SITE (109): Xaa equals any of the naturally occurring L-amino acids
  SITE (111): Xaa equals any of the naturally occurring L-amino acids
VQVLTQYYQSNILNILSQVICLSIVYFEGFLSFTFNLFFISISSXVALSYSYPDIHLISEGLDITLVKMQSDLILFLKQTAVLLERPRAHRFSTRVGYXVSVHXSGSXXVX

SEQ ID NO: 1003 - protein, 43 aa, Homo sapiens
  SITE (13): Xaa equals any of the naturally occurring L-amino acids
MLYVRLLKNTKIXVLILPLFILFLTLFLFIPNGFLFVFVSLYF

SEQ ID NO: 1004 - protein, 118 aa, Homo sapiens [sequence omitted]

SEQ ID NO: 1005 - protein, 64 aa, Homo sapiens
  SITE (55): Xaa equals any of the naturally occurring L-amino acids
  SITE (59): Xaa equals any of the naturally occurring L-amino acids
  SITE (63): Xaa equals any of the naturally occurring L-amino acids
SIKSCSSFYLGSRVNRAQLTNYPPAMRTYVYECHCDKSTSRATAGPSIFHPGGVXGMWXIFAXV

SEQ ID NO: 1006 - protein, 42 aa, Homo sapiens
  SITE (21): Xaa equals any of the naturally occurring L-amino acids
  SITE (23): Xaa equals any of the naturally occurring L-amino acids
  SITE (42): Xaa equals any of the naturally occurring L-amino acids
HSPESCYSFNLGSRMRISVEXKXAKSNSAADNPETLRKGYVX

SEQ ID NO: 1007 - protein, 76 aa, Homo sapiens
MLVLLSLLASGGLPLLLVGDVLASKSSTVLFLPGDSSPGCSMITPLPPSRMCLKAGSSGEQTVVPLSLLLRSKSSK

SEQ ID NO: 1008 - protein, 76 aa, Homo sapiens
  SITE (71): Xaa equals any of the naturally occurring L-amino acids
MLVLLSLLASGGLPLLLVGDVLASKSSTVLFLPGDSSPGCSMITPLPPSRMCLKAGSSGEQTVVPLSLLLXSKSSK

SEQ ID NO: 1009 - protein, 9 aa, Homo sapiens
CHLQHSCRE

SEQ ID NO: 1010 - protein, 34 aa, Homo sapiens
MTALFCSLLHSLVSLLLPTKWGQGKAFLTGPLFS

SEQ ID NO: 1011 - protein, 10 aa, Homo sapiens
FSCCLSLPIS

SEQ ID NO: 1012 - protein, 71 aa, Homo sapiens
MWCLVFCSCVSLPRMMASSFIHDIAKDMISFLFMSAWYYTYFNSFEIYRFQFTFIEYSLWVKHHASLPGVQ

SEQ ID NO: 1013 - protein, 71 aa, Homo sapiens; identical to SEQ ID NO: 1012

SEQ ID NO: 1014 - protein, 74 aa, Homo sapiens
ARREGRSRTAVGSTPAAPLSLTRGGQCPSRGSPLALFGHPLASQKHSETKTFPFPPPHMVLRLPAAMQLKQLIF

SEQ ID NO: 1015 - protein, 21 aa, Homo sapiens
MSLSLISLSFLFPAGAGRRSC

SEQ ID NO: 1016 - protein, 21 aa, Homo sapiens
MSLSLISLSFLFPAGAGRRSC

SEQ ID NO: 1017 - protein, 25 aa, Homo sapiens
MLHWGVLCSLFLMLFNEGASASLQQ

SEQ ID NO: 1018 - protein, 55 aa, Homo sapiens
MLHWGVLCSLFLMLFNEGASASLSNKRSMREDRAVHGYGYWTRIFGKVKADHWIW

SEQ ID NO: 1019 - protein, 95 aa, Homo sapiens
  SITE (13): Xaa equals any of the naturally occurring L-amino acids
MRACLCAGVCMCXASCLGLPMNVVECYTWRVLVFHQFQDEELHDTVDLETIPLERQPRDVQHPVSTRILYLHVYFVAVTLTLIRILQLWTEAFSP

SEQ ID NO: 1020 - protein, 261 aa, Homo sapiens
MELLQVTILFLLPSICSSNSTGVLEAANNSLVVTTTKPSITTPNTESLQKNVVTPTTGTTPKGTITNELLKMSLMSTATFLTSKDEGLKATTTDVRKNDSIISNVTVTSVTLPNAVSTLQSSKPKTETQSSIKTTEIPGSVLQPDASPSKTGTLTSIPVTIPENTSQSQVIGTEGGKNASTSATSRSYSSIILPVVIALIVITLSVFVLVGLYRMCWKADPGTPENGNDQPQSDKESVKLLTVKTISHESGEHSAQGKTKN

SEQ ID NO: 1021 - protein, 260 aa, Homo sapiens [sequence omitted]

SEQ ID NO: 1022 - protein, 53 aa, Homo sapiens
CVLEPTSSQSIAPDLGRESTFSIQRNKNMQFMVVLWTLTDCEGKVYPKAVICR

SEQ ID NO: 1023 - protein, 41 aa, Homo sapiens
MMLPVISLFLISLHLPIFCFQRLLLFKGFLFIANSSNLHIK

SEQ ID NO: 1024 - protein, 41 aa, Homo sapiens; identical to SEQ ID NO: 1023

SEQ ID NO: 1025 - protein, 162 aa, Homo sapiens
  SITE (16): Xaa equals any of the naturally occurring L-amino acids
  SITE (17): Xaa equals any of the naturally occurring L-amino acids
  SITE (18): Xaa equals any of the naturally occurring L-amino acids
KTVMLPIAQEVQSPVXXXCDKLAADCAHELRRHGVSCVSLWPGIVQTELLKEHMAKEEVLQDPVLKQFKSAFSSAETTELSGKCVVALATDPNILSLSGKVLPSCDLARRYGLRDVDGRPVQDYLSLSSVLSHVSGLGWLASYLPSFLRVPKWIIALYTSKF

SEQ ID NO: 1026 - protein, 45 aa, Homo sapiens
MARWLLPCLPPLHSVTSWLLTVPTSCGAMGSAVCLCGRGLCRQNC

SEQ ID NO: 1027 - protein, 37 aa, Homo sapiens
  SITE (29): Xaa equals any of the naturally occurring L-amino acids
LPPFPQCDKLAADCPTSCGAMGSAVCLCXRGLCRQNC

SEQ ID NO: 1028 - protein, 45 aa, Homo sapiens; identical to SEQ ID NO: 1026

SEQ ID NO: 1029 - protein, 29 aa, Homo sapiens
MDQFLQYLLECMLLCTTAGASGATYVPTR

SEQ ID NO: 1030 - protein, 42 aa, Homo sapiens
MDQFLQYLLECMLLCTTAGASGAHLCTNEMTLLEAILYLQWM

SEQ ID NO: 1031 - protein, 53 aa, Homo sapiens
CLILQEENRKELSNLANRYKIDSRVLSPTLGWQPVGQTPKTVADVFFCLPSLG

SEQ ID NO: 1032 - protein, 56 aa, Homo sapiens [sequence omitted]

SEQ ID NO: 1033 - protein, 4 aa, Homo sapiens
VWMP

SEQ ID NO: 1034 - protein, 56 aa, Homo sapiens [sequence omitted]

SEQ ID NO: 1035 - protein, 491 aa, Homo sapiens
  SITE (42): Xaa equals any of the naturally occurring L-amino acids
  SITE (43): Xaa equals any of the naturally occurring L-amino acids
  SITE (44): Xaa equals any of the naturally occurring L-amino acids
AARVGRHGRRRRSAAMAGRGGSALLALCGALAACGWLLGAEXXXPGAPAAGMRRRRRLQQEDGISFEYHRYPELREALVSVWLQCTAISRIYTVGRSFEGRELLVIELSDNPGVHEPGEPEFKYIGNMHGNEAVGRELLIFLAQYLCNEYQKGNETIVNLIHSTRIHIMPSLNPDGFEKAASQPGELKDWFVGRSNAQGIDLNRNFPDLDRIVYVNEKEGGPNNHLLKNMKKIVDQNTKLAPETKAVIHWIMDIPFVLSANLHGGDLVANYPYDETRSGSAHEYSSSPDDAIFQSLARAYSSFNPAMSDPNRPPCRKNDDDSSFVDGTTNGGAWYSVPGGMQDFNYLSSNCFEITVELSCEKFPPEETLKTYWEDNKNSLISYLEQIHRGVKGFVRDLQGNPIANATISVEGIDHDVTSAKDGDYWRLLIPGNYKLTASAPGYLAITKKVAVPYSPAAGVDFELESFSERKEEEKEELMEWWKMMSETLNF

SEQ ID NO: 1036 - protein, 255 aa, Homo sapiens
LLLWTMSVIFFACVVRVRDGLPLSASTDFYHTQDFLEWRRRLKSLALRLAQYPGRGSAEGCDFSIHFSSFGDVACMAICSCQCPAAMAFCFLETLWWEFTASYDTTCIGLASRPYAFLEFDSIIQKVKWHFNYVSSSQMECSLEKIQEELKLQPPAVLTLEDTDVANGVMNGHTPMHLEPAPNFRMEPVTALGILSLILNIMCAALNLIRGVHLAEHSLQVAHEEIGNILAFLVPFVACIFQDPRSWFCWLDQTS

SEQ ID NO: 1037 - protein, 99 aa, Homo sapiens
  SITE (44): Xaa equals any of the naturally occurring L-amino acids
MLLLLVFLVACFINRKCQKQRKKKPAEDILEEYPLNTKVEVPKXHPDRVEKNVNRHYCTVRNVNILSEPEAAYTFKGAKVKRLNLEVRVHNNLQDGTEV

SEQ ID NO: 1038 - protein, 5 aa, Homo sapiens
MPVLL

SEQ ID NO: 1039 - protein, 99 aa, Homo sapiens
MLLLLVFLVACFINRKCQKQRKKKPAEDILEEYPLNTKVEVPKRHPDRVEKNVNRHYCTVRNVNILSEPEAAYTFKGAKVKRLNLEVRVHNNLQDGTEV

SEQ ID NO: 1040 - protein, 70 aa, Homo sapiens
LLDLTNRLVTCIDQSKPNILASLSLAEQTRVGIWVGAFSIKDNLSLCSQGEHLCFVLKAGSPWFANCLQE

SEQ ID NO: 1041 - protein, 48 aa, Homo sapiens
MLQYTWLILVFLSSCLSATWFCKVVVAAIGSTVGSSRLHFKRSGQCLR

SEQ ID NO: 1042 - protein, 48 aa, Homo sapiens; identical to SEQ ID NO: 1041

SEQ ID NO: 1043 - protein, 52 aa, Homo sapiens
  SITE (39): Xaa equals any of the naturally occurring L-amino acids
MVAVDFSCLSFILLGILVLYIYFVMYACSIPTLFSVFYXEEMLNLSKLSCIY

SEQ ID NO: 1044 - protein, 13 aa, Homo sapiens
CFHFFLCPILVLV

SEQ ID NO: 1045 - protein, 1 aa, Homo sapiens
C

SEQ ID NO: 1046 - protein, 37 aa, Homo sapiens
MVAVDFSCLSFILLGILVLYIYFVMYACSIPTLFSVL

SEQ ID NO: 1047 - protein, 6 aa, Homo sapiens
NLSKII

SEQ ID NO: 1048 - protein, 183 aa, Homo sapiens [sequence omitted]

SEQ ID NO: 1049 - protein, 183 aa, Homo sapiens [sequence omitted]

SEQ ID NO: 1050 - protein, 31 aa, Homo sapiens
  SITE (9): Xaa equals any of the naturally occurring L-amino acids
PGPPLSFFXFFFFFFFFFFFFFFKHCIQVSL

SEQ ID NO: 1051 - protein, 63 aa, Homo sapiens
  SITE (54): Xaa equals any of the naturally occurring L-amino acids
MNHCCSSQRFLNILSFCISPPFPLTFIYLIMYLFIYLYTFAPFSTNTKQSKKKXYIYISVYVL

SEQ ID NO: 1052 - protein, 63 aa, Homo sapiens
MNHCCSSQRFLNILSFCISPPFPLTFIYLIMYLFIYLYTFAPFSTNTKQSKKKKYIYISVYVL

SEQ ID NO: 1053 - protein, 75 aa, Homo sapiens
  SITE (9): Xaa equals any of the naturally occurring L-amino acids
ADNNFTQEXAMTMITPSSKLTLTKGNKSWSSTAVAAALELVDPPGCRNSARDNQFILLNWHILNHDSQQLGNIFF

SEQ ID NO: 1054 - protein, 113 aa, Homo sapiens
  SITE (31): Xaa equals any of the naturally occurring L-amino acids
  SITE (79): Xaa equals any of the naturally occurring L-amino acids
  SITE (102): Xaa equals any of the naturally occurring L-amino acids
  SITE (111): Xaa equals any of the naturally occurring L-amino acids
CGVFWLLSLLCCIKEQQFEQVVALLLQSIRXCQDRALLVNNAYQGLASLVKVSELAAFKVVVQEEGGSGLSLIKETYQXHRGRTRRWWENVGMLLVPPGFLXRRSCRSWCXVV

SEQ ID NO: 1055 - protein, 2 aa, Homo sapiens
IL

SEQ ID NO: 1056 - protein, 161 aa, Homo sapiens
MAEASCGVFWLLSLLCCIKEQQFEQVVALLLQSIRLCQDRALLVNNAYQGLASLVKVSELAAFKVVVQEEGGSGLSLIKETYQLHRDDPEVVENVGMLLVHLASYEEILPELVSSSMKALLQEIKERFTSSLELVSCVEKVLLRLEAATSPSPLGGEAAQP

SEQ ID NO: 1057 - protein, 491 aa, Homo sapiens; identical to SEQ ID NO: 1035
  SITE (42): Xaa equals any of the naturally occurring L-amino acids
  SITE (43): Xaa equals any of the naturally occurring L-amino acids
  SITE (44): Xaa equals any of the naturally occurring L-amino acids

SEQ ID NO: 1058 - protein, 79 aa, Homo sapiens
  SITE (15): Xaa equals any of the naturally occurring L-amino acids
  SITE (21): Xaa equals any of the naturally occurring L-amino acids
  SITE (49): Xaa equals any of the naturally occurring L-amino acids
  SITE (65): Xaa equals any of the naturally occurring L-amino acids
  SITE (66): Xaa equals any of the naturally occurring L-amino acids
MRLASSLSVFPLLPXTCGHSXALLPSSIGQHSETFTRCRPLTFPVFRTXKPMNPYEITQFCGILXXATQTGLKTGTLHG

SEQ ID NO: 1059 - protein, 20 aa, Homo sapiens
REKSSLSVPVLVCLCCYNRI

SEQ ID NO: 1060 - protein, 244 aa, Homo sapiens
LVPLVFSLLVQSCKQVYRSIAMKFVPCLLLVTLSCLGTLGQAPRQKQGSTGEEFHFQTGGRDSCTMRPSSLGQGAGEVWLRVDCRNTDQTYWCEYRGQPSMCQAFAADPKSYWNQALQELRRLHHACQGAPVLRPSVCREAGPQAHMQQVTSSLKGSPEPNQQPEAGTPSLRPKATVKLTEATQLGKDSMEELGKAKPTTRPTAKPTQPGPRPGGNEEAKKKAWEHCWKPFQALCAFLISFFRG

SEQ ID NO: 1061 - protein, 70 aa, Homo sapiens
MRLASSLSVFPLLPLTCGHSLALLPSSIGQHSETFTRCRPLTFPVFRTINQVNPYKSPSLWYSVIATQTD

SEQ ID NO: 1062 - protein, 304 aa, Homo sapiens
TCPLLRNSSHAEPAHRQDGDLALTPCLGPGLGNPGRVRQKAGNRSSGGYSLRGQQHLGPLLLATAGAAGARERGQALHGVEMVAVRADVWHVRGRWRQLGHRPVARLHQLFAVVLFQQLLQGRSILFLLCDQAHQDPNGVLIGILSPVGRVDSTASTSRAGPDLLVRRAVVALPLEEVAHQDAQQPHEAEDRDDGDDRVLGGCLLWATCPGAVPRLPCLTTAAGPCCHLHATSGPPPPLITAMSTQRCPGTWLTWNAGNPPRPKPPRPAVSTECISSCHAHLGLQPPPKAATGMGLAWAGAPCS

SEQ ID NO: 1063 - protein, 52 aa, Homo sapiens
MGGCLLSLSLCFVPVVRLAASVARWAWLEPWVRQVAGGDRERLRGKWWHLLL

SEQ ID NO: 1064 - protein, 52 aa, Homo sapiens; identical to SEQ ID NO: 1063

SEQ ID NO: 1065 - protein, 58 aa, Homo sapiens
DLSGGEWNVTTRTRLWEIQPHLCFVMILKLDFSCRDFLSILPGVLTYSLPVKRFKKKN

SEQ ID NO: 1066 - protein, 21 aa, Homo sapiens
CFFQLSPEEVSWCPNVGSSFD

SEQ ID NO: 1067 - protein, 37 aa, Homo sapiens
  SITE (5): Xaa equals any of the naturally occurring L-amino acids
MGKLXLTLLLCLLQLLPPEVYYSRWGANMMAQTPLNP

SEQ ID NO: 1068 - protein, 62 aa, Homo sapiens
MGKLTLTLLLCLLQLLPPEVYYSRWGANMMAQTPLNSMRSPWPMEILLFFPLFSSSVFIGSA

SEQ ID NO: 1069 - protein, 63 aa, Homo sapiens
MSLDSLVLVKALFCFTFVVQITLSNISSTNVSILVFVHTAITSPLQTFQFWHYEEVAVNLKYL

SEQ ID NO: 1070 - protein, 63 aa, Homo sapiens; identical to SEQ ID NO: 1069

SEQ ID NO: 1071 - protein, 2 aa, Homo sapiens
LQ

SEQ ID NO: 1072 - protein, 2 aa, Homo sapiens
LQ

SEQ ID NO: 1073 - protein, 48 aa, Homo sapiens
  SITE (38): Xaa equals any of the naturally occurring L-amino acids
  SITE (42): Xaa equals any of the naturally occurring L-amino acids
  SITE (44): Xaa equals any of the naturally occurring L-amino acids
MGLRQQLELKLKLILLLCVFWFKSCTYILALLFLYSGXMWVXHXGRKI

SEQ ID NO: 1074 - protein, 261 aa, Homo sapiens
  SITE (90): Xaa equals any of the naturally occurring L-amino acids
  SITE (93): Xaa equals any of the naturally occurring L-amino acids
  SITE (169): Xaa equals any of the naturally occurring L-amino acids
  SITE (237): Xaa equals any of the naturally occurring L-amino acids
  SITE (239): Xaa equals any of the naturally occurring L-amino acids
  SITE (240): Xaa equals any of the naturally occurring L-amino acids
  SITE (253): Xaa equals any of the naturally occurring L-amino acids
TVADVRRPFAQVNVLAEEVLIYRIVLNDIVGDVVQDHQVRLRRKDDAVIRQLEATMLVGRKHRHGDVLVRETTVSDARPEDRVHFRHVCXPQXKRVSLLDVVIAAHRLIHTKGTHKANYCRRHTVTRVRVDVVRTEARFKQLGRGITFPDSPLTRTEHTDRFRPFFFQXGFEFLFHHIEGLIPGDWGKFAFFVIFTVFHTQQRLRQTVFTVHDFGQEIALNAVQATVNRCVRVALTXQXXVPAAFRPERRNQXRRTTQFAI

SEQ ID NO: 1075 - protein, 61 aa, Homo sapiens
FYTNVTYKSDATTLRFPGRCDFSSAWEVDLHQPFQCSAHPGAGITAPHLLGEKPGRPEEVG

SEQ ID NO: 1076 - protein, 54 aa, Homo sapiens [sequence omitted]

SEQ ID NO: 1077 - protein, 5 aa, Homo sapiens
QYLLI

SEQ ID NO: 1078 - protein, 30 aa, Homo sapiens
  SITE (2): Xaa equals any of the naturally occurring L-amino acids
  SITE (13): Xaa equals any of the naturally occurring L-amino acids
  SITE (16): Xaa equals any of the naturally occurring L-amino acids
MXASQYILFFLQXLGXKLQFQGISSQQQVE

SEQ ID NO: 1079 - protein, 30 aa, Homo sapiens
MRASQYILFFLQFLGFKLQFQGISSQQQVE

SEQ ID NO: 1080 - protein, 7 aa, Homo sapiens
MFGCPFC

SEQ ID NO: 1081 - protein, 261 aa, Homo sapiens; identical to SEQ ID NO: 595

SEQ ID NO: 1082 - protein, 11 aa, Homo sapiens
FLLSLHLAALQ

SEQ ID NO: 1083 - protein, 41 aa, Homo sapiens [sequence omitted]

SEQ ID NO: 1084 - protein, 141 aa, Homo sapiens
GGERHLHRTHPRLPGHRFLRLHRAPRVPHVCGVRAHGAGVPHLVSGGDEVSPGGAGPVSHSAEEQPVHQVDRLCGACPGQRVFLCPGEPGAKSGRHLSGGVPPYTECDHAQPLARPGAVESCNHEVCAQTGETVQPLMARR

SEQ ID NO: 1085 - protein, 45 aa, Homo sapiens
MSMKCYLVVLICIPLMATDAECLFLCLRAMRISLEKGLSRSFAYF

SEQ ID NO: 1086 - protein, 136 aa, Homo sapiens
  SITE (1): Xaa equals any of the naturally occurring L-amino acids
  SITE (3): Xaa equals any of the naturally occurring L-amino acids
  SITE (8): Xaa equals any of the naturally occurring L-amino acids
  SITE (14): Xaa equals any of the naturally occurring L-amino acids
XYXSCRKXYLTYGXNSRVDPRVRHVCGVRAHGAGVPHLVSGGDEVSPGGAGPVSHSAEEQPVHQVDRLCGACPGQRVFLCPGEPGAKSGRHLSGGVPPYTECDHAQPLARPGAVESCNHEVCAQTGETVQPLMARR

SEQ ID NO: 1087 - protein, 45 aa, Homo sapiens; identical to SEQ ID NO: 1085

SEQ ID NO: 1088 - protein, 177 aa, Homo sapiens
  SITE (90): Xaa equals any of the naturally occurring L-amino acids
  SITE (173): Xaa equals any of the naturally occurring L-amino acids
LDIKVLQVPTRLRSPAGFTQWIQHWGSRWSCLPVPRCAPALLSPWVVDGTGRCGAGGGAPWGGSGRTGAHGGWGEGQAWRAAGPEPCPAXRQLRPSEKSSTAAAGPGAKALTAWGRPAALSGAPPSPRPPGTHSGPQALRAAPVPARPSPSAPPRKLRELAPALASPERGSYXAAAG

SEQ ID NO: 1089 - protein, 414 aa, Homo sapiens
  SITE (174): Xaa equals any of the naturally occurring L-amino acids
  SITE (410): Xaa equals any of the naturally occurring L-amino acids
MERAVRVESGVLVGVVCLLLACPATATGPEVAQPEVDTTLGRVRGRQVGVKGTDRLVNVFLGIPFAQPPLGPDRFSAPHPAQPWEGVRDASTAPPMCLQDVESMNSSRFVLNGKQQIFSVSEDCLVLNVYSPAEVPAGSGRPVMVWVHGGALITGAATSYDGSALAAYGDVVVXTVQYRLGVLGFFSTGDEHAPGNQGFLDVVAALRWVQENIAPFGGDLNCVTVFGGSAGGSIISGLVLSPVAAGLFHRAITQSGVITTPGIIDSHPWPLAQKIANTLACSSSSPAEMVQCLQQKEGEELVLSKKLKNTIYPLTVDGTVFPKSPKELLKEKPFHSVPFLMGVNNHEFSWLIPRGWGLLDTMEQMSREDMLAISTPVLTSLDVPPEMMPTVIDEYLGSNSDAQAKCQAFXGIHG

SEQ ID NO: 1090 - protein, 571 aa, Homo sapiens
MERAVRVESGVLVGVVCLLLACPATATGPEVAQPEVDTTLGRVRGRQVGVKGTDRLVNVFLGIPFAQPPLGPDRFSAPHPAQPWEGVRDASTAPPMCLQDVESMNSSRFVLNGKQQIFSVSEDCLVLNVYSPAEVPAGSGRPVMVWVHGGALITGAATSYDGSALAAYGDVVVVTVQYRLGVLGFFSTGDEHAPGNQGFLDVVAALRWVQENIAPFGGDLNCVTVFGGSAGGSIISGLVLSPVAAGLFHRAITQSGVITTPGIIDSHPWPLAQKIANTLACSSSSPAEMVQCLQQKEGEELVLSKKLKNTIYPLTVDGTVFPKSPKELLKEKPFHSVPFLMGVNNHEFSWLIPRGWGLLDTMEQMSREDMLAISTPVLTSLDVPPEMMPTVIDEYLGSNSDAQAKCQAFQEFMGDVFINVPTVSFSRYLRDSGSPVFFYEFQHRPSSFAKIKPAWVKADHGAEGAFVFGGPFLMDESSRLAFPEATEEEKQLSLTMMAQWTHFARTGDPNSKALPPWPQFNQAEQYLEINPVPRAGQKFREAWMQFWSETLPSKIQQWHQKQKNRKAQEDL

SEQ ID NO: 1091 - protein, 68 aa, Homo sapiens
  SITE (68): Xaa equals any of the naturally occurring L-amino acids
MISSLLSKAVLSLWISVFSWNVLGCKKLKTIILQCFKEASDLVLRERYLGVVQALSDDFSFCFTILSX

SEQ ID NO: 1092 - protein, 56 aa, Homo sapiens
VSKLFDLVRVALWESTFLSLSLSVPSVCAMFRSSEESKISSEFKIIFVFLLFNVME

SEQ ID NO: 1093 - protein, 66 aa, Homo sapiens [sequence omitted]

SEQ ID NO: 1094 - protein, 21 aa, Homo sapiens
  SITE (15): Xaa equals any of the naturally occurring L-amino acids
RWRGASTPHRDYLSXRYCACG

SEQ ID NO: 1095 - protein, 11 aa, Homo sapiens
WQILLIALLLI

SEQ ID NO: 1096 - protein, 38 aa, Homo sapiens
MLRWRLLATALIALCRRSASSVASGEPPDSPPCPWRRR

SEQ ID NO: 1097 - protein, 76 aa, Homo sapiens
  SITE (62): Xaa equals any of the naturally occurring L-amino acids
  SITE (70): Xaa equals any of the naturally occurring L-amino acids
  SITE (71): Xaa equals any of the naturally occurring L-amino acids
  SITE (74): Xaa equals any of the naturally occurring L-amino acids
MLHMYSQKDPLILCVRLAVLLAVTLTVPVVLFPIRRALQQLLFPGKAFSWPRHVAIALILLXLVNVLASXXQPXGI

SEQ ID NO: 1098 - protein, 54 aa, Homo sapiens
  SITE (26): Xaa equals any of the naturally occurring L-amino acids
  SITE (27): Xaa equals any of the naturally occurring L-amino acids
  SITE (36): Xaa equals any of the naturally occurring L-amino acids
  SITE (40): Xaa equals any of the naturally occurring L-amino acids
  SITE (44): Xaa equals any of the naturally occurring L-amino acids
  SITE (47): Xaa equals any of the naturally occurring L-amino acids
  SITE (49): Xaa equals any of the naturally occurring L-amino acids
MLHMYSQKDPLILCVPPGRAARGDPXXASRAGPYPXGPAXAAFXRQXLXLGTTW

SEQ ID NO: 1099 - protein, 148 aa, Homo sapiens
  SITE (2): Xaa equals any of the naturally occurring L-amino acids
  SITE (17): Xaa equals any of the naturally occurring L-amino acids
LXMYSQKDPLILCVRLXVLLAVTLTVPVVLFPIRRALQQLLFPGKAFSWPRHVAIALILLVLVNVLVICVPTIRDIFGVIGSTSAPSLIFILPSIFYLRIVPSEVEPFLSWPKIQALCFGVLGVLFMAVSLGFMFANWATGQSRMSGH

SEQ ID NO: 1100 - protein, 149 aa, Homo sapiens
MLHMYSQKDPLILCVRLAVLLAVTLTVPVVLFPIRRALQQLLFPGKAFSWPRHVAIALILLVLVNVLVICVPTIRDIFGVIGSTSAPSLIFILPSIFYLRIVPSEVEPFLSWPKIQALCFGVLGVLFMAVSLGFMFANWATGQSRMSGH

SEQ ID NO: 1101 - protein, 40 aa, Homo sapiens
MILRGVYSMVPIYTHMIFLFTFFLTISGKYFKIFEKHSRI

SEQ ID NO: 1102 - protein, 40 aa, Homo sapiens; identical to SEQ ID NO: 1101

SEQ ID NO: 1103 - protein, 56 aa, Homo sapiens
MNLWLGALIPVTVHLKRMWSHPKFQAQKTFPLSKSPKYHPVFLLVIIMARSSQLKR

SEQ ID NO: 1104 - protein, 106 aa, Homo sapiens
QGFIFWTQYNIGYISLRSIGFQHKSLPIRKSKWRKHQIIIIITQQKCGDWQWFWGFISSIRASASHFMKLLPSERTLNTPRSYCSFFLNGILKNWLKREEHSKYIL

SEQ ID NO: 1105 - protein, 56 aa, Homo sapiens; identical to SEQ ID NO: 1103

SEQ ID NO: 1106 - protein, 116 aa, Homo sapiens
  SITE (14): Xaa equals any of the naturally occurring L-amino acids
  SITE (25): Xaa equals any of the naturally occurring L-amino acids
  SITE (33): Xaa equals any of the naturally occurring L-amino acids
VGFQGLEGNPPPAXLNGLEGKGKLXKKAQGTGXKIIFWPKESKTPSGSPKPAKAANSKSKESDEPHHSKNERPARPPPPIMTDGEDADYTHFTNQQSSTRHFSKSESSHKGFHYKH

SEQ ID NO: 1107 - protein, 4 aa, Homo sapiens
VLRN

SEQ ID NO: 1108 - protein, 4 aa, Homo sapiens
VLRN

SEQ ID NO: 1109 - protein, 54 aa, Homo sapiens [sequence omitted]

SEQ ID NO: 1110 - protein, 5 aa, Homo sapiens
TTMTG

SEQ ID NO: 1111 - protein, 40 aa, Homo sapiens
MPTTVGAQIFIFIFLLCTLFFLPFYGCLKSREKGRLVNDE

SEQ ID NO: 1112 - protein, 40 aa, Homo sapiens; identical to SEQ ID NO: 1111

SEQ ID NO: 1113 - protein, 101 aa, Homo sapiens [sequence omitted]

SEQ ID NO: 1114 - protein, 216 aa, Homo sapiens
  SITE (86): Xaa equals any of the naturally occurring L-amino acids
MKERKGFNLQGPLILWSFCLAIFSILGAVRMWGIMGTVLLTGGLKQTVCFINFIDNSTVKFWSWVFLLSKVIELGDTAFIILRKRXLIFIHWYHHSTVLVYTSFGYKNKVPAGGWFVTMNFGVHAIMYTYYTLKAANVKPPKMLPMLITSLQILQMFVGAIVSILTYIWRQDQGCHTTMEHLFWSFILYMTYFILFAHFFCQTYIRPKVKAKTKSQ

SEQ ID NO: 1115 - protein, 216 aa, Homo sapiens
MKERKGFNLQGPLILWSFCLAIFSILGAVRMWGIMGTVLLTGGLKQTVCFINFIDNSTVKFWSWVFLLSKVIELGDTAFIILRKRPLIFIHWYHHSTVLVYTSFGYKNKVPAGGWFVTMNFGVHAIMYTYYTLKAANVKPPKMLPMLITSLQILQMFVGAIVSILTYIWRQDQGCHTTMEHLFWSFILYMTYFILFAHFFCQTYIRPKVKAKTKSQ

SEQ ID NO: 1116 - protein, 16 aa, Homo sapiens
VLGLGVVLTPIIPVLW

SEQ ID NO: 1117 - protein, 55 aa, Homo sapiens
  SITE (30): Xaa equals any of the naturally occurring L-amino acids
NNLCFISPFTSMYWLAQFIVSEKQGTHLHXLQETVLPFNLKTRKLNFNRNLLSML

SEQ ID NO: 1118 - protein, 32 aa, Homo sapiens
MHMWILSLHFIFTPRLVLCEVRPNKIVEDTII

SEQ ID NO: 1119 - protein, 1 aa, Homo sapiens
A

SEQ ID NO: 1120 - protein, 51 aa, Homo sapiens
  SITE (20): Xaa equals any of the naturally occurring L-amino acids
  SITE (38): Xaa equals any of the naturally occurring L-amino acids
MELLQAKKLLLLLGLFVSCXSNIRKTEPCFGLDSITFXDPKKKCLSNLKSC

SEQ ID NO: 1121 - protein, 51 aa, Homo sapiens
MELLQAKKLLLLLGLFVSCCSNIRKTEPCFGLDSITFRDPKKKCLCNLKSC

SEQ ID NO: 1122 - protein, 2 aa, Homo sapiens
YF

SEQ ID NO: 1123 - protein, 88 aa, Homo sapiens
LTTPYGGLCKQSTRGSIISTWQCTWWLCDLEKVSYSCLCVLTLETETLFVVFTLFQQQKLFQGKSYRTFKHVCIHTYPIPHYIKVILL

SEQ ID NO: 1124 - protein, 82 aa, Homo sapiens
MNLGWYQMHPLKMIWLTIFLTWLMRQASPTGHDLEVKVFCCYCGLKYLVMGEECRVVALAQTQENPFSPLFYFCYSDHLSPF

SEQ ID NO: 1125 - protein, 82 aa, Homo sapiens; identical to SEQ ID NO: 1124

SEQ ID NO: 1126 - protein, 84 aa, Homo sapiens
  SITE (17): Xaa equals any of the naturally occurring L-amino acids
MGTFSLMLLLLPSVVCXSFKVRPLFCRAAVVCSGSTSDPIHLGPSHTWRCHQWRLQNSKDGCLLLPPGSPSQRETDLMLAGMLL

SEQ ID NO: 1127 - protein, 25 aa, Homo sapiens
GLFALSFLFLLVVMLGCQFDIFLAF

SEQ ID NO: 1128 - protein, 84 aa, Homo sapiens
MGTFSLMLLLLPSVVCFSFKVRPLFCRAAVVCSGSTSDPIHLGPSHTWRCHQWRLQNSKDGCLLLPPGSPSQRETDLMLAGMLL

SEQ ID NO: 1129 - protein, 219 aa, Homo sapiens [sequence omitted]

SEQ ID NO: 1130 - protein, 219 aa, Homo sapiens
  SITE (104): Xaa equals any of the naturally occurring L-amino acids
  SITE (197): Xaa equals any of the naturally occurring L-amino acids
MEMASKMKDTGFIVFAVLLLVSCLILIFVIAPRYGQRNILIYIIICSVIGAFSVAAVKGLGITIKNFFQGLPVVRHPLPYILSLILALSLSTQVNFLNRALDIXNTSLVFPIYYVFFTTVVVTSSIILFKEWYSMSAVDIAGTLSGFVTIILGVFMLHAFKDLDISCASLPHMHKNPPPSPAPEPTVIRLEDKNVLXDNIELASTSSPEEKPKVFIIHS

SEQ ID NO: 1131 - protein, 217 aa, Homo sapiens
MASKMKDTGFIVFAVLLLVSCLILIFVIAPRYGQRNILIYIIICSVIGAFSVAAVKGLGITIKNFFQGLPVVRHPLPYILSLILALSLSTQVNFLNRALDIFNTSLVFPIYYVFFTTVVVTSSIILFKEWYSMSAVDIAGTLSGFVTIILGVFMLHAFKDLDISCASLPHMHKNPPPSPAPEPTVIRLEDKNVLVDNIELASTSSPEEKPKVFIIHS

SEQ ID NO: 1132 - protein, 253 aa, Homo sapiens
  SITE (215): Xaa equals any of the naturally occurring L-amino acids
  SITE (252): Xaa equals any of the naturally occurring L-amino acids
  SITE (253): Xaa equals any of the naturally occurring L-amino acids
MQACVLLLGLVLSAQLQSPENMRMGGGRVLLRAHPVPAGGGQCQSSAKGPWVGTGPEREERDSPEGRWASYWAQSWEGVAASTGWAWTPLAPTPSGCGCSLSLESRTGPGCLGGCQVPPELPRAPTCKCQPQGSAQMRPSQLQPAMPWDAHREGGGFGLLSPWERLGAVTARLAQAHCRVGWLPQPGLGGTPGSGPPCLESQWGDGEETWPPMAXGQLRTRTCWSWKCCGVEGWGGQLLTPASCLLLSTFPXX

SEQ ID NO: 1133 - protein, 102 aa, Homo sapiens
NSEKGQKKQRGPRWICQLFCRCFLPLLWVVCSPLQTSARREGLNLPAPQDLLPSGPSPALRSLPDRRVDRATWAARETHGGPPCGQPCQLPPSPELHLHLEE

SEQ ID NO: 1134 - protein, 137 aa, Homo sapiens
MQACVLLLGLVLSAQLQSPENMRMGGGRVLLRAHPVPAGGGQCQSSAKGPWVGTGPEREERDSPEGRWASYWAQSWEGVAASTGWAWTPLAPTPSGCGCSPKPGEQDRPGVSGRLPGASQSSQGPPPASASLRAVPK

SEQ ID NO: 1135 - protein, 93 aa, Homo sapiens
  SITE (34): Xaa equals any of the naturally occurring L-amino acids
  SITE (76): Xaa equals any of the naturally occurring L-amino acids
MYALYITVHGYFLITFLFGMVVLALVVWKIFTLXRATAVKERGKNRKKVLTLLGLSSLVGVTWGLAIFTPLGLSTXYIFALFNSLQAQRGITV

SEQ ID NO: 1136 - protein, 93 aa, Homo sapiens
MYALYITVHGYFLITFLFGMVVLALVVWKIFTLSRATAVKERGKNRKKVLTLLGLSSLVGVTWGLAIFTPLGLSTVYIFALFNSLQAQRGITV

SEQ ID NO: 1137 - protein, 122 aa, Homo sapiens [sequence omitted]

SEQ ID NO: 1138 - protein, 241 aa, Homo sapiens
APGQTPSLCSWLLPLPSTWATTGHVCFSDILQTPDGGQLLLDWAKQPDSSQDPDPTTQPIVLLLPGITGSSQETYVLHLVNQALRDGYQAVVFNNRGCRGEELRTHRAFCASNTEDLETVVNHIKHRYPQAPLLAVGISFGGILVLNHLAQARQAAGLVAALTLSACWDSFETTRSLETPLNSLLFNQPLTAGLCQLVERLSYGKTCRPVQSASLMSATHLWPLDIKTVLPTTKQQALEPR

SEQ ID NO: 1139 - protein, 242 aa, Homo sapiens
MAPGQTPSLCSWLLPLPSTWATTGHVCFSDILQTPDGGQLLLDWAKQPDSSQDPDPTTQPIVLLLPGITGSSQETYVLHLVNQALRDGYQAVVFNNRGCRGEELRTHRAFCASNTEDLETVVNHIKHRYPQAPLLAVGISFGGILVLNHLAQARQAAGLVAALTLSACWDSFETTRSLETPLNSLLFNQPLTAGLCQLVERLSYGKTCRPVQSASLMSATHLWPLDIKTVLPTTKQQALEPR

SEQ ID NO: 1140 - protein, 180 aa, Homo sapiens
  SITE (143): Xaa equals any of the naturally occurring L-amino acids
MGWPRPGRALVAVKALLVLSLLQVPAQAVVRAVLEDNSSSVDFADLPALFGVPLAPEGIRGYLMEVKPANACHPIEAPRLGNRSLGAIVLIRRYDCTFDLKVLNAQRAGFEAAIVHNVHSDDLVSMTHVYEDLRGQIAIPSVXVSEAARRTCGSSWAATSRPTRCPADDPPCHDLAVTPC

SEQ ID NO: 1141 - protein, 225 aa, Homo sapiens
  SITE (21): Xaa equals any of the naturally occurring L-amino acids
  SITE (45): Xaa equals any of the naturally occurring L-amino acids
TQPCQRPGIVTPVLTVSWVLXCTLALVVSAFFVLNHLWLWAQACXSHRRPVKTSTCQKAQVRTFTWHNDLCAICLDEYEEGDQLKILPCSHTYHCKCIDPWFSQAPRRSCPVCKQSVAATEDSFDSTTYSFRDEDPSLPGHRPPIWAIQVQYAPGGWSCWAAPVPTATAAPRPWRQSIPLSPQPLLRPLVSKDLGQGGGCNEECFWSEKNKVGLKAEKKKKKKTR

SEQ ID NO: 1142 - protein, 359 aa, Homo sapiens [sequence omitted]

SEQ ID NO: 1143 - protein, 133 aa, Homo sapiens
MWHTKPLGSGSCVPLLPLLLLLLLLFPLLPWPPPLPPPPPSSLHPFAPAFPATGSLSSNNSQLLAPLRLQNALHLFKCFPVLFPLHKIISFHPEYPWQAPIFQYFYLSIPSSSLHPEHLGHSFVSTLHSPTRQ

SEQ ID NO: 1144 - protein, 86 aa, Homo sapiens
  SITE (72): Xaa equals any of the naturally occurring L-amino acids
PCCFHKPHASHIMNFLIRIQCIYLPKIVCAYSKYEQFLNNGSIIFVQNAKNWGQAWWHTPVIPALWEAKVGXSPEVRSLRPAWPAW

SEQ ID NO: 1145 - protein, 133 aa, Homo sapiens; identical to SEQ ID NO: 1143

SEQ ID NO: 1146 - protein, 99 aa, Homo sapiens
  SITE (91): Xaa equals any of the naturally occurring L-amino acids
MAALLLLPLLLLLPLLLLKLHLWPQLRWLPADLAFAVRALCCKRALRARALAAAAADPEGPEGGCSLAWRLAELAQQRAELLLRSRALATXRRSARVTG

SEQ ID NO: 1147 - protein, 455 aa, Homo sapiens
MAALLLLPLLLLLPLLLLKLHLWPQLRWLPADLAFAVRALCCKRALRARALAAAAADPEGPEGPCILAWRLAELAQQRARNFLLRSRALATQRRSARVTGLTRLPTCARLGLGTRRRRQRRGERWRRRAGSAGSRRCSGRKRRGVCRRGRCRQRWRSRAPLSPGATVALLLPAGPEFLWLWIGLAKAGLRTAFVPTALRRGPLLHCLRSCGARALVLAPEFLESLEPDLPALRAMGLHLWAAGPGTHPAGISDLLAEVSAEVDGPVPGYLSSPQSITDTCLYIFTSGTTGLPKAARISHLKILQCQGFYQLCGVHQEDVIYLALPLYHMSGSLLGIVGCMGIGATVVLKSKFSAGQFWEDCQQHRVTVFQYIGELCRYLVNQPPSKAERGHKVRLAVGSGLRPDTWERFVRRFGPLQVLETYGLTEGNVPPSTTQDSGALWGVLPGFTSISSPSP

SEQ ID NO: 1148 - protein, 153 aa, Homo sapiens
  SITE (77): Xaa equals any of the naturally occurring L-amino acids
  SITE (82): Xaa equals any of the naturally occurring L-amino acids
  SITE (83): Xaa equals any of the naturally occurring L-amino acids
  SITE (86): Xaa equals any of the naturally occurring L-amino acids
  SITE (91): Xaa equals any of the naturally occurring L-amino acids
  SITE (122): Xaa equals any of the naturally occurring L-amino acids
  SITE (124): Xaa equals any of the naturally occurring L-amino acids
MMLIPMASVMAVTEPKWVSVWSRFLWVTLLSMVLGSLLALLLPLGAVEEQCLAVLKGLYLLRSKPDRAQHAAPSAPXRPRSXXSPXGARRXLVAKTKAFSSGVKFGKAQELALEPRPWKIKXAXGQSRGKKAQKSSFNAPPFKEWDPGNFPGD

SEQ ID NO: 1149 - protein, 361 aa, Homo sapiens
  SITE (2): Xaa equals any of the naturally occurring L-amino acids
  SITE (4): Xaa equals any of the naturally occurring L-amino acids
  SITE (19): Xaa equals any of the naturally occurring L-amino acids
AXPXGKLEARAALNQALEXKRQGKREKAQKLFMHALKMDPDFVDALTEFGIFSEEDKDIIQADYLYTRALTISPYHEKALVNRDRTLPLVEEIDQRYFSIIDSKVKKVMSIPKGNSALRRVMEETYYHHIYHTVAIEGNTLTLSEIRHILETRYAVPGKSLEEQNEVIGMHAAMKYINTTLVSRIGSVTISDVLEIHRRVLGYVDPVEAGRFRTTQVLVGHHIPPHPQDVEKQMQEFVQWLNSEEAMNLHPVEFAALAHYKLVYIHPFIDGNGRTSRLLMNLILMQAGYPPITIRKEQRSDYYHVLEAANEGDVRPFIRFIAKCTETTLDTLLFATTEYSVALPEAQPNHSGFKETLPVKP

SEQ ID NO: 1150 - protein, 458 aa, Homo sapiens
MMLIPMASVMAVTEPKWVSVWSRFLWVTLLSMVLGSLLALLLPLGAVEEQCLAVLKGLYLLRSKPDRAQHAATKCTSPSTELSITSRGATLLVAKTKASPAGKLEARAALNQALEMKRQGKREKAQKLFMHALKMDPDFVDALTEFGIFSEEDKDIIQADYLYTRALTISPYHEKALVNRDRTLPLVEEIDQRYFSIIDSKVKKVMSIPKGNSALRRVMEETYYHHIYHTVAIEGNTLTLSEIRHILETRYAVPGKSLEEQNEVIGMHAAMKYINTTLVSRIGSVTISDVLEIHRRVLGYVDPVEAGRFRTTQVLVGHHIPPHPQDVEKQMQEFVQWLNSEEAMNLHPVEFAALAHYKLVYIHPFIDGNGRTSRLLMNLILMQAGYPPITIRKEQRSDYYHVLEAANEGDVRPFIRFIAKCTETTLDTLLFATTEYSVALPEAQPNHSGFKETLPVKP

SEQ ID NO: 1151 - protein, 125 aa, Homo sapiens
  SITE (46): Xaa equals any of the naturally occurring L-amino acids
AQRNPGAVPAVWRQAGVTFTSAKGRSSPYWSLHPQIILLRKLSSSXQKPRSSSAQCGRNAAAGLPHCLRASWSRLLKIEWQVGLAWAGADVLCGHPVPKRPPTLGPQTSGADWHLRGHSPTHLLQ

SEQ ID NO: 1152 - protein, 17 aa, Homo sapiens
MLSGSLGSAVCMSSQPR

SEQ ID NO: 1153 - protein, 17 aa, Homo sapiens
MLSGSLGSAVCMSSQPR

SEQ ID NO: 1154 - protein, 254 aa, Homo sapiens
  SITE (218): Xaa equals any of the naturally occurring L-amino acids
  SITE (228): Xaa equals any of the naturally occurring L-amino acids
  SITE (240): Xaa equals any of the naturally occurring L-amino acids
ETRLHHVSTLAAFTVRQVQQHQGNLDASGPARDLVDAFLLKMAQEEQNPGTEFTNKNMLMTVIYLLFAGTMTVSTTVGYTLLLLMKYPHVQKWVREELNRELGAGQAPSLGDRTRSLTPTRFCMRRSGCWRWCPWEYPAPSCGPPASEGTPCPRARRSSPSLAPSCMTPTSSSTQKSSTQTVSWMQMDGSGSMRRSCLLLKEACLPWKGPGKSGALPXLHHHPTSLLXGEPVPAGHPEPXAHRQWPFQHSPSLP

SEQ ID NO: 1155 - protein, 302 aa, Homo sapiens
MEATGTWALLLALALLLLLTLALSGTRARGHLPPGPTPLPLLGNLLQLRPGALYSGLMRLSKKYGPVFTIYLGPWRPVVVLVGQEAVREALGGQAEEFSGRGTVAMLEGTFDGHGVFFSNGERWRQLRKFTMLALRDLGMGKREGEELIQAEARCLVETFQGTEGRPFDPSLLLAQATSNVVCSLLFGLRFSYEDKEFQAVVRAAGGTLLGVSSQGGQVSGWDPSPTTFPEGSCQGPMRTSCPSPHRPTRCSPGSCGPCQAPTSSSSTTSAPWLPSQSGRCSSTRGTWMLRAPHVTLSMPSC

SEQ ID NO: 1156 - protein, 302 aa, Homo sapiens; identical to SEQ ID NO: 1155

SEQ ID NO: 1157 - protein, 240 aa, Homo sapiens
MTAPVPAPRILLPLLLLLLLTPPPGARGEVCMASRGLSLFPESCPDFCCGTCDDQYCCSDVLKKFVWSEERCAVPEASVPASVEPVEQLGSALRFRPGYNDPMSGFGATLAVGLTIFVLSVVTIIICFTCSCCCLYKTCRRPRPVVTTTTSTTVVHAPYPQPPSVPPSYPGPSYQGYHTMPPQPGMPAAPYPMQYPPPYPAQPMGPPAYHETLAGGAAAPYPASQPPYNPAYMDAPKAAL

SEQ ID NO: 1158 - protein, 240 aa, Homo sapiens; identical to SEQ ID NO: 1157

SEQ ID NO: 1159 - protein, 116 aa, Homo sapiens
MKGLRSLAATTLALFLVFVFLGNSSCAPQRLLERRNWTPQAMLYLKGAQGRRFISDQSRRKDLSDRPLPERRSPNPQLLTIPEAATILLASLQKSPEDEEKNFDQTRFLEDSLLNW

SEQ ID NO: 1160 - protein, 116 aa, Homo sapiens; identical to SEQ ID NO: 1159

SEQ ID NO: 1161 - protein, 426 aa, Homo sapiens
VVPFSGMLPPGAEKAVASFVTQLAAAEALQKAPDVTTLPRNVMFVFFQGETFDYIGSSRMVYDMEKGKFPVQLENVDSFVELGQVALRTSLELWMHTDPVSQKNESVRNQVEDLLATLEKSGAGVPAVILRRPNQSQPLPPSSLQRFLRARNISGVVLADHSGAFHNKYYQSIYDTAENINVSYPEWLSPEEDLNFVTDTAKALADVATVLGRALYELAGGTNFSDTVQADPQTVTRLLYGFLIKANNSWFQSILRQDLRSYLGDGPLQHYIAVSSPTNTTYVVQYALANLTGTVVNLTREQCQDPSKVPSENKDLYEYSWVQGPLHSNETDRLPRCVRSTARLARALSPAFELSQWSSTEYSTWTESRWKDIRARIFLIASKELELITLTVGFGILIFSLIVTYCINAKADVLFIAPREPGAVSY

SEQ ID NO: 1162 - protein, 417 aa, Homo sapiens
MATAGGGSGADPGSRGLLRLLSFCVLLAGLCRGNSVERKIYIPLNKTAPCVRLLNATHQIGCQSSISGDTGVIHVVEKEEDLQWVLTDGPNPPYMVLLESKHFTRDLMEKLKGRTSRIAGLAVSLTKPSPASGFSPSVQCPNDGFGVYSNSYGPEFAHCREIQWNSLGNGLAYEDFSFPIFLLEDENETKVIKQCYQDHNLSQNGSAPTFPLCAMQLFSHMHAVISTATCMRRSSIQSTFSINPEIVCDPLSDYNVWSMLKPINTTGTLKPDDRVVVAATRLDSRSFFWNVAPGAESAVASFVTQLAAAEALQKAPDVTTLPRNVMFVFFQGETFDYIGSSRMVYDMEKGKFPVQLENVDSFVELGQVALRTSLELWMHTDPVSQKNESVRNQVEDLLATLETVSYAHLNLQGGEVL

SEQ ID NO: 1163 - protein, 709 aa, Homo sapiens
  SITE (216): Xaa equals any of the naturally occurring L-amino acids
MATAGGGSGADPGSRGLLRLLSFCVLLAGLCRGNSVERKIYIPLNKTAPCVRLLNATHQIGCQSSISGDTGVIHVVEKEEDLQWVLTDGPNPPYMVLLESKHFTRDLMEKLKGRTSRIAGLAVSLTKPSPASGFSPSVQCPNDGFGVYSNSYGPEFAHCREIQWNSLGNGLAYEDFSFPIFLLEDENETKVIKQCYQDHNLSQNGSAPSFPLCAMXLFSHMHAVISTATCMRRSSIQSTFSINPEIVCDPLSDYNVWSMLKPINTTGTLKPDDRVVVAATRLDSRSFFWNVAPGAESAVASFVTQLAAAEALQKAPDVTTLPRNVMFVFFQGETFDYIGSSRMVYDMEKGKFPVQLENVDSFVELGQVALRTSLELWMHTDPVSQKNESVRNQVEDLLATLEKSGAGVPAVILRRPNQSQPLPPSSLQRFLRARNISGVVLADHSGAFHNKYYQSIYDTAENINVSYPEWLSPEEDLNFVTDTAKALADVATVLGRALYELAGGTNFSDTVQADPQTVTRLLYGFLIKANNSWFQSILRQDLRSYLGDGPLQHYIAVSSPTNTTYVVQYALANLTGTVVNLTREQCQDPSKVPSENKDLYEYSWVQGPLHSNETDRLPRCVRSTARLARALSPAFELSQWSSTEYSTWTESRWKDIRARIFLIASKELELITLTVGFGILIFSLIVTYCINAKADVLFIAPREPGAVSY

SEQ ID NO: 1164 - protein, 230 aa, Homo sapiens
MTGLYELVWRVLHALLCLHRTLTSWLRVRFGTWNWIWRRCCRAASAAVLAPLGFTLRKPPAVGRNRRHHRHPRGGSCLAAAHHRMRWRADGRSLEKLPVHMGLVITEVEQEPSFSDIASLVVWCMAVGISYISVYDHQGIFKRNNSRLMDEILKQQQELLGLDCSKYSPEFANSNDKDDQVLNCHLAVKVLSAGRWKSRYCKSCSGLLPVSSPEAKETHRFGCRYVSQFT

SEQ ID NO: 1165 - protein, 293 aa, Homo sapiens
MTGLYELVWRVLHALLCLHRTLTSWLRVRFGTWNWIWRRCCRAASAAVLAPLGFTLRKPPAVGRNRRHHRHPRGGSCLAAAHHRMRWRADGRSLEKLPVHMGLVITEVEQEPSFSDIASLVVWCMAVGISYISVYDHQGIFKRNNSRLMDEILKQQQELLGLDCSKYSPEFANSNDKDDQVLNCHLAVKVLSPEDGKADIVRAAQDFCQLVAQKQKRPTDLDVDTLASLLSSNGCPDPDLVLKFGPVDSTLGFLPWHIRLTEIVSLPSHLNISYEDFFSALRQYAACEQRLGK

SEQ ID NO: 1166 - protein, 173 aa, Homo sapiens
  SITE (85): Xaa equals any of the naturally occurring L-amino acids
  SITE (128): Xaa equals any of the naturally occurring L-amino acids
  SITE (146): Xaa equals any of the naturally occurring L-amino acids
  SITE (160): Xaa equals any of the naturally occurring L-amino acids
  SITE (168): Xaa equals any of the naturally occurring L-amino acids
  SITE (172): Xaa equals any of the naturally occurring L-amino acids
MVEEPGRFLPLWLHILLITVLLVLSGIFSGLNLGLMALDPMELRIVQNCGTEKERRYARKIEPIRRKGNYLLCSLLLGNVLVNTXLTILLDNLIGSGLMAVASSTIGIVIFGEILPQALCSRHGLAVXANTILLTKFFMLLTFPLXFPISKLLDFFLGQXIRTVYNRXKLMXM

SEQ ID NO: 1167 - protein, 173 aa, Homo sapiens
  SITE (146): Xaa equals any of the naturally occurring L-amino acids
  SITE (160): Xaa equals any of the naturally occurring L-amino acids
  SITE (168): Xaa equals any of the naturally occurring L-amino acids
  SITE (172): Xaa equals any of the naturally occurring L-amino acids
MVEEPGRFLPLWLHILLITVLLVLSGIFSGLNLGLMALDPMELRIVQNCGTEKERRYARKIEPIRRKGNYLLCSLLLGNVLVNTSLTILLDNLIGSGLMAVASSTIGIVIFGEILPQALCSRHGLAVGANTILLTKFFMLLTFPLXFPISKLLDFFLGQXIRTVYNRXKLMXM

SEQ ID NO: 1168 - protein, 314 aa, Homo sapiens
  SITE (93): Xaa equals any of the naturally occurring L-amino acids
EKAAGAGKSHLAIVQKVNNEGEGDPFYEVLGLVTLEDVIEEIIKSEILDESDMYTDNRSRKRVSEKNKRDFSAFKDADNELKVKISPQLLLAXHRFLATEVSQFSPSLISEKILLRLLKYPDVIQELKFDEHNKYYARHYLYTRNKPADYFILILQGKVEVEAGKENMKFETGAFSYYGTMALTSVPSDRSPAHPTPLSRSASLSYPDRTDVSTAATLAGSSNQFGSSVLGQYISDFSVRALVDLQYIKITRQQYQNGLLASRMENSPQFPIDGCTTHMENLAEKSELPVVDETTTLLNERNSLLHKASHENAI

SEQ ID NO: 1169 - protein, 604 aa, Homo sapiens
MVEEPGRFLPLWLHILLITVLLVLSGIFSGLNLGLMALDPMELRIVQNCGTEKERRYARKIEPIRRKGNYLLCSLLLGNVLVNTSLTILLDNLIGSGLMAVASSTIGIVIFGEILPQALCSRHGLAVGANTILLTKFFMLLTFPLSFPISKLLDFFLGQEIRTVYNREKLMEMLKVTEPYNDLVKEELNMIQGALELRTKTVEDIMTQLQDCFMIRSDAILDFNTMSEIMESGYTRIPVFEDEQSNIVDILYVKDLAFVDPDDCTPLKTITRFYNHPVHFVFHDTKLDAMLEEFKKGKSHLAIVQKVNNEGEGDPFYEVLGLVTLEDVIEEIIKSEILDESDMYTDNRSRKRVSEKNKRDFSAFKDADNELKVKISPQLLLAAHRFLATEVSQFSPSLISEKILLRLLKYPDVIQELKFDEHNKYYARHYLYTRNKPADYFILILQGKVEVEAGKENMKFETGAFSYYGTMALTSVPSDRSPAHPTPLSRSASLSYPDRTDVSTAATLAGSSNQFGSSVLGQYISDFSVRALVDLQYIKITRQQYQNGLLASRMENSPQFPIDGCTTHMENLAEKSELPVVDETTTLLNERNSLLHKASHENAI

SEQ ID NO: 1170 - protein, 189 aa, Homo sapiens
  SITE (169): Xaa equals any of the naturally occurring L-amino acids
  SITE (172): Xaa equals any of the naturally occurring L-amino acids
  SITE (180): Xaa equals any of the naturally occurring L-amino acids
MAAASAGATRLLLLLLMAVAAPSRARGSGCRAGTGARGAGAEGREGEACGTVGLLLEHSFEIDDSANFRKRGSLLWNQQDGTLSLSQRQLSEEERGRLRDVAALNGLYRVRIPRRPGALDGLEAGGYVSSFVPACSLVESHLSDQLTLHVDVAGNVVGVSVVTHPMAPXSPXGFPLPWSXAEILATIQF

SEQ ID NO: 1171 - protein, 117 aa, Homo sapiens
AASAGATRLLLLLLMAVAAPSRARGSGCRAGTGARGAGAEGREGEACGTVGLLLEHSFEILATMPVLTSHPPTPSPCSLGTCRLLSSLCAFVPGGLTLLSLAGLGGPVQAPAAPPSL

SEQ ID NO: 1172 - protein, 241 aa, Homo sapiens
MAAASAGATRLLLLLLMAVAAPSRARGSGCRAGTGARGAGAEGREGEACGTVGLLLEHSFEIDDSANFRKRGSLLWNQQDGTLSLSQRQLSEEERGRLRDVAALNGLYRVRIPRRPGALDGLEAGGYVSSFVPACSLVESHLSDQLTLHVDVAGNVVGVSVVTHPMAPCSPRGFPPAHGVEPEILATMPVLTSHPPTPSPCSLGTCRLLSSLCAFVPGGLTLLSLAGLGGPVQAPAAPPSL

SEQ ID NO: 1173 - protein, 265 aa, Homo sapiens
  SITE (215): Xaa equals any of the naturally occurring L-amino acids
MFLLFLLTCELAAEVAAEVEKSSDGPGAAQEPTWLTDVPAAMEFIAATEVAVIGFFQDLEIPAVPILHSMVQKFPGVSFGISTDSEVLTHYNITGNTICLFRLVDNEQLNLEDEDIESIDATKLSRFIEINSLHMVTEYNPVTVIGLFNSVIQIHLLLIMNKASPEYEENMHRYQKAAKLFQGKILFILVDSGMKENGKVISFFKLKESQLPALXIYQTLDDEWDTLPTAEVSVEHVQNFCDGFLSGKLLKENRESEGKTPKVEL

SEQ ID NO: 1174 - protein, 265 aa, Homo sapiens
MFLLFLLTCELAAEVAAEVEKSSDGPGAAQEPTWLTDVPAAMEFIAATEVAVIGFFQDLEIPAVPILHSMVQKFPGVSFGISTDSEVLTHYNITGNTICLFRLVDNEQLNLEDEDIESIDATKLSRFIEINSLHMVTEYNPVTVIGLFNSVIQIHLLLIMNKASPEYEENMHRYQKAAKLFQGKILFILVDSGMKENGKVISFFKLKESQLPALAIYQTLDDEWDTLPTAEVSVEHVQNFCDGFLSGKLLKENRESEGKTPKVEL

SEQ ID NO: 1175 - protein, 158 aa, Homo sapiens [sequence omitted]

SEQ ID NO: 1176 - protein, 291 aa, Homo sapiens
MSQEGVELEKSVRRLREKFHGKVSSKKAGALMRKFGSDHTGVGRSIVYGVKQKDGQELSNDLDAQDPPEDMKQDRDIQAVATSLLPLTEANLRMFQRAQDDLIPAVDRQFACSSCDHVWWRRVPQRKEVSRCRKCRKRYEPVPADKMWGLAEFHCPKCRHNFRGWAQMGSPSPCYGCGFPVYPTRILPPRWDRDPDRRSTHTHSCSAADCYNRREPHVPGTSCAHPKSRKQNHLPKVLHPSNPHISSGSTVATCLSQGGLLEDLDNLILEDLKEEEEEEEEVEDEEGGPRE

SEQ ID NO: 1177 - protein, 125 aa, Homo sapiens [sequence omitted]

SEQ ID NO: 1178 - protein, 6 aa, Homo sapiens
  SITE (4): Xaa equals any of the naturally occurring L-amino acids
GTQXAL

SEQ ID NO: 1179 - protein, 125 aa, Homo sapiens [sequence omitted]

SEQ ID NO: 1180 - protein, 132 aa, Homo sapiens
  SITE (104): Xaa equals any of the naturally occurring L-amino acids
  SITE (120): Xaa equals any of the naturally occurring L-amino acids
MPDVQGPWHPAHPPIPSAALCLLWPHCLAAPKYARPRCLLVFVLCDRSAWNILLYSVGSKVSGLCSNCSLVPGVVAHTCNPKVPLGLQGCELPCPAEHLIFSKXLSSCATWAHCFLGLSXCWCLHPHPHPSW

SEQ ID NO: 1181 - protein, 92 aa, Homo sapiens
SGLAWALLLSLPGGLRSSSARLPPEPFHGQGLSSVGAIRRRVCRSVRLGDPWGMEGTTRPFPSVPCQAVLTAASSQGRKPGQRQRLLVPSIP

SEQ ID NO: 1182 - protein, 139 aa, Homo sapiens
TFRLVSAHLKTRKLINPEAAERRWRDWDSRQGWLSVKMQRVSGLLSWTLSRVLWLSGLSEPGAARQPRIMEEKALEVYDLIRTIRDPEKPNTLEELEVVSESCVEVQEINEEEYLVIIRFTPTVPHCSLATLIVGNLHF

SEQ ID NO: 1183 - protein, 143 aa, Homo sapiens
MPDVQGPWHPAHPPIPSAALCLLWPHCLAAPKYARPRCLLVFVLCDRSAWNILLYSVGSKVSGLCSNCSLVPGVVAHTCNPKVPLGLQGCELPCPAEHLIFSKCLSSCATWAHCFLGLSCCWCLHPHPHPSWPAPFLSRWAHV

SEQ ID NO: 1184 - protein, 13 aa, Homo sapiens
MGQGACKNMSVGS

SEQ ID NO: 1185 - protein, 102 aa, Homo sapiens; identical to SEQ ID NO: 1133

SEQ ID NO: 1186 - protein, 259 aa, Homo sapiens
  SITE (62): Xaa equals any of the naturally occurring L-amino acids
AGAWVSLGPCLFPAPADSEQRPWVRRVGVGPLPAEPGQGELQESPLCPCSWNVPQRPHLKGXCAGGVAQSHTASTLSSGTGDSGCSGKGLLDVTYNSVRLETDAGGGRAGPPGITDHRKMGGGSRGPAPTPSCLTLLSCPHPCAFVPETRVATQAGPGSSLILPLPSEPCSSLPSPLPPLPRRVTSDRAPLAIQGGSRGLDRRARRLPAVAGASCPCRVGELSGREPYLPSAKTVKVYRLFTDFYLNCKSADFVNVLGV

SEQ ID NO: 1187 - protein, 119 aa, Homo sapiens
MGQGACQKYVCWFLNVVCPCPPGSGRVHVSPHTCAREGASWRGDSRARGLHLWLPLASLGGPGLPGSQALSCGTWHLADQLAGRKIGGHRAGGQCPLPVSIRSTCHCMQPVGTFLAVRN

SEQ ID NO: 1188 - protein, 177 aa, Homo sapiens
MRGSVECTWGWGHCAPSPLLLWTLLLFAAPFGLLGEKTRQVSLEVIPNWLGPLQNLLHIRAVGTNSTLHYVWSSLGPLAVVMVATNTPHSTLSVNWSLLLSPEPDGGLMVLPKDSIQFSSALVFTRLLEFDSTNVSDTAAKPLGRPYPPYSLADFSWNNITDSLDPATLSATFQGTP

SEQ ID NO: 1189 - protein, 330 aa, Homo sapiens
RPTRPLNCGRMRGSVECTWGWGHCAPSPLLLWTLLLFAAPFGLLGEKTRQLLEFDSTNVSDTAAKPLGRPYPPYSLADFSWNNITDSLDPATLSATFQGHPMNDPTRTFANGSLAFRVQAFSRSSRPAQPPRLLHTADTCQLEVALIGASPRGNRSLFGLEVATLGQGPDCPSMQEQHSIDDEYAPAVFQLDQLLWGSLPSGFAQWRPVAYSQKPGGRESALPCQASPLHPALAYSLPQSPIVRAFFGSQNNFCAFNLTFGASTGPGYWDQHYLSWSMLLGVGFPPVDGLSPLVLGIMAVALGAPGLMLLGGGLVLLLHHKKYSEYQSIN

SEQ ID NO: 1190 - protein, 95 aa, Homo sapiens
MAASRWARKAVVLLCASDLLLLLLLLPPPGSCAAEARPGRPTSLPHLPGRRRRIFAITMMQTWRVFWSNGRKMMTLKKEIFQSTRDLQHLSTSQR

SEQ ID NO: 1191 - protein, 234 aa, Homo sapiens
MAASRWARKAVVLLCASDLLLLLLLLPPPGSCAAEGSPGTPDESTPPPRKKKKDIRDYNDADMARLLEQWEKDDDIEEGDLPEHKRPSAPVDFSKIDPSKPESILKMTKKGKTLMMFVTVSGSPTEKETEEITSLWQGSLFNANYDVQRFIVGSDRAIFMLRDGSYAWEIKDFLVGQDRCADVTLEGQVYPGKGGGSKEKNKTKQDKGKKKKEGDLKSRSSKEENRAGNKREDL

SEQ ID NO: 1192 - protein, 108 aa, Homo sapiens [sequence omitted]

SEQ ID NO: 1193 - protein, 108 aa, Homo sapiens [sequence omitted]

SEQ ID NO: 1194 - protein, 147 aa, Homo sapiens
  SITE (25): Xaa equals any of the naturally occurring L-amino acids
  SITE (30): Xaa equals any of the naturally occurring L-amino acids
  SITE (31): Xaa equals any of the naturally occurring L-amino acids
RLLHFNCHSGFLTQSPYCRQARHRXLHQGXXPAAARLWCDCQRPAPRVARTELGRHTGIHGSTFSSTTLGPIFWLLVKSPELAAQPSTYLAVAEELADVSGKYFDGLKQKAPAPEAEDEEVARRLWAESARLVGLEAPSVREQPLPR

SEQ ID NO: 1195 - protein, 240 aa, Homo sapiens; identical to SEQ ID NO: 700

SEQ ID NO: 1196 - protein, 174 aa, Homo sapiens
  SITE (142): Xaa equals any of the naturally occurring L-amino acids
  SITE (160): Xaa equals any of the naturally occurring L-amino acids
  SITE (162): Xaa equals any of the naturally occurring L-amino acids
MAVARLAAVAAWVPCRSWGWAAVPFGPHRGLSVLLARIPQRAPRWLPACRQKTSLSFLNRPDLPNLAYKKLKGKSPGIIFIPGYLSYMNGTKALAIEEFCKSLGHACIRFDYSGVGSSDGNSEESTLGKWRKDVLSIIDDLXDGPQILVGSSLGGWLMLXAXNCTTREGLALIG

SEQ ID NO: 1197 - protein, 160 aa, Homo sapiens
ILVGSSLGGWLMLHAAIARPEKVVALIGVATAADTLVTKFNQLPVELKKEVEMKGVWSMPSKYSEEGVYNVQYSFIKEAEHHCLLHSPIPVNCPIRLLHGMKDDIVPWHTSMQVADRVLSTDVDVILRKHSDHRMREKADIQLLVYTIDDLIDKLSTIVN

SEQ ID NO: 1198 - protein, 306 aa, Homo sapiens
MAVARLAAVAAWVPCRSWGWAAVPFGPHRGLSVLLARIPQRAPRWLPACRQKTSLSFLNRPDLPNLAYKKLKGKSPGIIFIPGYLSYMNGTKALAIEEFCKSLGHACIRFDYSGVGSSDGNSEESTLGKWRKDVLSIIDDLADGPQILVGSSLGGWLMLHAAIARPEKVVALIGVATAADTLVTKFNQLPVELKKEVEMKGVWSMPSKYSEEGVYNVQYSFIKEAEHHCLLHSPIPVNCPIRLLHGMKDDIVPWHTSMQVADRVLSTDVDVILRKHSDHRMREKADIQLLVYTIDDLIDKLSTIVN

SEQ ID NO: 1199 - protein, 205 aa, Homo sapiens
  SITE (40): Xaa equals any of the naturally occurring L-amino acids
  SITE (189): Xaa equals any of the naturally occurring L-amino acids
MGSWALLWPPLLFTGLLVRPPGTMAQAQYCSVNKDIFEVXENTNVTEPLVDIHVPEGQEVTLGALSTPFAFRIQGNQLFLNVTPDYEEKSLLEAQLLCQSGGTLVTQLRVFVSVLDVNDNAPEFPFKTKEIRVEEDTKVNSTVIPETQLQAEDRDKDDILVYTLQEMTAGASGLLLLVSVNRPPELDRXLTSTSGEHDLLLAGAD

SEQ ID NO: 1200 - protein, 124 aa, Homo sapiens
PQGQLGARPQPHARPQARGGTDARRARTPRPCLPRRCPEPPAAARAGGSPTAVRSILTKERRPEGGYKAVWFGEDIGTEADVVVLNAPTLDVDGASDSGSGDEGEGAGRGGGPYDAPGGDDSYI

SEQ ID NO: 1201 - protein, 447 aa, Homo sapiens
  SITE (260): Xaa equals any of the naturally occurring L-amino acids
FPAGAASTVLAHNKMLKVSAVLCVCAAAWCSQSLAAAAAVAAAGGRSDGGNFLDDKQWLTTISQYDKEVGQWNKFRDDDYFRTWSPGKPFDQALDPAKDPCLKMKCSRHKVCIAQDSQTAVCISHRRLTHRMKEAGVDHRQWRGPILSTCKQCPVVYPSPVCGSDGHTYSFQCKLEYQACVLGKQISVKCEGHCPCPSDKPTSTSRNVKRACSDLEFREVANRLRDWFKALHESGSQNKKTKTLLRPERSRFDTSILPIXKDSLGWMFNRLDTNYDLLLDQSELRSIYLDKNEQCTKAFFNSCDTYKDSLISNNEWCYCFQRQQDPPCQTELSNIQKRQGVKKLLGQYIPLCDEDGYYKPTQCHGSVGQCWCVDRYGNEVMGSRINGVADCAIDFEISGDFASGDFHEWTDDEDDEDDIMNDEDEIEDDDEDEGDDDDGGDDHDVYI

SEQ ID NO: 1202 - protein, 551 aa, Homo sapiens
MGSWALLWPPLLFTGLLVRPPGTMAQAQYCSVNKDIFEVEENTNVTEPLVDIHVPEGQEVTLGALSTPFAFRIQGNQLFLNVTPDYEEKSLLEAQLLCQSGGTLVTQLRVFVSVLDVNDNAPEFPFKTKEIRVEEDTKVNSTVIPETQLQAEDRDKDDILFYTLQEMTAGASDYFSLVSVNRPALRLDRPLDFYERPNMTFWLLVRDTPGENVEPSHTATATLVLNVVPADLRPPWFLPCTFSDGYVCIQAQYHGAVPTGHILPSPLVLRPGPIYAEDGDRGINQPIIYSIFRGNVNGTFIIHPDSGNLTVARSVPSPMTFLLLVKGQQADLARYSVTQVTVEAVAAAGSPPRFPQSLYRGTVARGAGAGVVVKDAAAPSQPLRIQAQDPEFSDLNSAITYRITNHSHFRMEGEVVLTTTTLAQAGAFYAEVAAPRRTSASRWWIWRPWAGCWVRCCCWLSLASPSLSTSTMAPGSSAALAKLRSPSPKALTTRRSSLTTRPTGRPSPAPRTTPSPRRHRCPQSPHPPALPPQAVPLSPPQRPELAEAPRR

SEQ ID NO: 1203 - protein, 71 aa, Homo sapiens
  SITE (18): Xaa equals any of the naturally occurring L-amino acids
  SITE (57): Xaa equals any of the naturally occurring L-amino acids
FCKGQAALALAACGVLLXSGGPAAAWEADPAGRCGRVPTARGRSWRKPLCGAFQPGXSWPEAPRRCRTSPC

SEQ ID NO: 1204 - protein, 52 aa, Homo sapiens
  SITE (3): Xaa equals any of the naturally occurring L-amino acids
  SITE (4): Xaa equals any of the naturally occurring L-amino acids
  SITE (25): Xaa equals any of the naturally occurring L-amino acids
  SITE (37): Xaa equals any of the naturally occurring L-amino acids
  SITE (49): Xaa equals any of the naturally occurring L-amino acids
NSXXDPDNVLWPGRWTQFCCIKVKXDFQEEASVGVSXGGYRIGVDENQXKGC

SEQ ID NO: 1205 - protein, 138 aa, Homo sapiens
VFCKGQAALALAACGVLLGSGGPAAAWEADPRGQVWPCPDRARTEVGGSPCAVPSSPEEAGLKPPGVAEASPCQRPKPRLGFYRCSFPSTWSPSTPSSPNSQPPFFFFLHASKVQGPQMYRSLMYHPAREPADYQAKK

SEQ ID NO: 1206 - protein, 193 aa, Homo sapiens
  SITE (140): Xaa equals any of the naturally occurring L-amino acids
  SITE (142): Xaa equals any of the naturally occurring L-amino acids
  SITE (147): Xaa equals any of the naturally occurring L-amino acids
  SITE (155): Xaa equals any of the naturally occurring L-amino acids
  SITE (162): Xaa equals any of the naturally occurring L-amino acids
MAGPTCRSLLLLKCLAEGRCLVCPSPSVVHCLVSVVFQMTILRDLEKLAGWHRIAIIFILSGITGNLASAIFLPYRAEVGPAGSQFGLLACSSWSSSRAGRCWRGPGRPSSTSRPSCSSWSSVASCPGSTHRPHLRASSXAXLLAFXFLPYITFXHQATSTXSGHLIPGGHLAGPLAGPSLARPFGAWGLGTF

SEQ ID NO: 1207 - protein, 349 aa, Homo sapiens
GKLVRLQVPVRNSRVDPRVRDDTGPPMDKSDLGQKRTSGAVCHQDPRTCEEPASSGAHIWPDDITKWPICTEQARSNHTGFLHVDCEIKGRPCCIGTKGSCEITTREYCEFMHGYFHEEATLCSQVHCLDKVCGLLPFLNPEVPDQFYRLWLSLFLHAGVVHCLVSVVFQMTILRDLEKLAGWHRIAIIFILSGITGNLASAIFLPYRAEVGPAGSQFGLLACLFVELFQSWPLLERPWKAFLNLSAIVLFLFICGLLPWIDNIAHIFGFLSGLLLAFAFLPYITFGTSDKYRKRALILVSLLAFAGLFAALVLWLYIYPINWPWIEHLTCFPFTSRFCEKYELDQVLH

SEQ ID NO: 1208 - protein, 217 aa, Homo sapiens [sequence omitted]

SEQ ID NO: 1209 - protein, 207 aa, Homo sapiens
  SITE (70): Xaa equals any of the naturally occurring L-amino acids
  SITE (71): Xaa equals any of the naturally occurring L-amino acids
  SITE (72): Xaa equals any of the naturally occurring L-amino acids
  SITE (73): Xaa equals any of the naturally occurring L-amino acids
  SITE (75): Xaa equals any of the naturally occurring L-amino acids
  SITE (81): Xaa equals any of the naturally occurring L-amino acids
  SITE (89): Xaa equals any of the naturally occurring L-amino acids
  SITE (90): Xaa equals any of the naturally occurring L-amino acids
  SITE (95): Xaa equals any of the naturally occurring L-amino acids
  SITE (97): Xaa equals any of the naturally occurring L-amino acids
  SITE (99): Xaa equals any of the naturally occurring L-amino acids
  SITE (105): Xaa equals any of the naturally occurring L-amino acids
  SITE (127): Xaa equals any of the naturally occurring L-amino acids
  SITE (141): Xaa equals any of the naturally occurring L-amino acids
  SITE (169): Xaa equals any of the naturally occurring L-amino acids
  SITE (178): Xaa equals any of the naturally occurring L-amino acids
  SITE (187): Xaa equals any of the naturally occurring L-amino acids
  SITE (194): Xaa equals any of the naturally occurring L-amino acids
MYYIAHLLKGALLFITIALIGSGWAFIKYVLSDKEKKVFGIVIPMQVLATWPTSSSSPARKAPATTCCGXXXXPXGPHLLXCHPVPVVXXHPASXGXVXPQDGKXASEPGQSLKLVPGIYYVMGHLXRLLSPGSIGHPACXVAWCPFSSGKWACTQASWVGRASTLGPXFGAYRAYKXSGPQGNKPXTLNLPKXGQGGMVKMEQVMD

SEQ ID NO: 1210 - protein, 553 aa, Homo sapiens
VDPRVRVAPEMAVSERRGLGRGSPAEWGQRLLLVLLLGGCSGRIHRLALTGEKRADIQLNSFGFYTNGSLEVELSVLRLGLREAEEKSLLVGFSLSRVRSGRVRSYSTRDFQDCPLQKNSSSFLVLFLINTKDLQVQVRKYGEQKTLFIFPGLLPEAPSKPGLPKPQATVPRKVDGGGTSAASKPKSTPAVIQGPSGKDKDLVLGLSHLNNSYNFSFHVVIGSQAEEGQYSLNFHNCNNSVPGKEHPFDITVMIREKNPDGFLSAAEMPLFKLYMVMSACFLAAGIFWVSILCRNTYSVFKIHWLMAALAFTKSISLLFHSINYYFINSQGHPIEGLAVMYYIAHLLKGALLFITIALIGSGWAFIKYVLSDKEKKVFGIVIPMQVLANVAYIIIESREEGASDYVLWKEILFLVDLICCGAILFPVVWSIRHLQDASGTDGKVAVNLAKLKLFRHYYVMVICYVYFTRIIAILLQVAVPFQWQWLYQLLVEGSTLAFFVLTGYKFQPTGNNPYLQLPQEDEEDVQMEQVMTDSGFREGLSKVNKTASGRELL

SEQ ID NO: 1211 - protein, 543 aa, Homo sapiens [sequence omitted]

SEQ ID NO: 1212 - protein, 204 aa, Homo sapiens
  SITE (162): Xaa equals any of the naturally occurring L-amino acids
  SITE (204): Xaa equals any of the naturally occurring L-amino acids
MAALAYNLGKREINHYFSVRSAKVLALVAVLLLAACHLASRRYRGNDSCEYLLSSGRFLGEKVWQPHSCMMHKYKISEAKNCLVDKHIAFIGDSRIRQLFYSFVKIINPQFKEEGNKHENIPFEDKTASVKVDFLWHPEVNGSMKQCIKVWTEDSIAKPHVXVAGAATWSIKIHNGSSEALSQYKMNITFIAPLLEKLAKTSDX

SEQ ID NO: 1213 - protein, 85 aa, Homo sapiens
  SITE (15): Xaa equals any of the naturally occurring L-amino acids
ELHKPFEYLIQDNGXVLLLQNNVYVCMYIWFSIYIKGLDEPPKNWLRTLQWNLQASICKSARHKTTCSLRAKRMRFSQILIILNV

SEQ ID NO: 1214 - protein, 289 aa, Homo sapiens
MAALAYNLGKREINHYFSVRSAKVLALVAVLLLAACHLASRRYRGNDSCEYLLSSGRFLGEKVWQPHSCMMHKYKISEAKNCLVDKHIAFIGDSRIRQLFYSFVKIINPQFKEEGNKHENIPFEDKTASVKVDFLWHPEVNGSMKQCIKVWTEDSIAKPHVIVAGAATWSIKIHNGSSEALSQYKMNITSIAPLLEKLAKTSDVYWVLQDPVYEDLLSENRKMITNEKIDAYNEAAVSILNSSTRNSKSNVKMFSVSKLIAQETIMESLDGLHLPESSRETVRNFYICQ

SEQ ID NO: 1215 - protein, 215 aa, Homo sapiens
CEVRPEVLFLTRHFIFHDNNNTWEGHYYHYSDPVCKHPTFSIYARGRYSRGVLSSRVMGGTEFVFKVNHMKVTPMDAATASLLNVFNGNECGAEGSWQVGIQQDVTHTNGCVALGIKLPHTEYEIFKMEQDARGRYLLFNGQRPSDGSSPDRPEKRATSYQMPLVQCASSSPRAEDLAEDSGSSLYGRAPGRHTWSLLLAALACLVPLLHWNIRR

SEQ ID NO: 1216 - protein, 466 aa, Homo sapiens
  SITE (268): Xaa equals any of the naturally occurring L-amino acids
  SITE (458): Xaa equals any of the naturally occurring L-amino acids
  SITE (460): Xaa equals any of the naturally occurring L-amino acids
  SITE (461): Xaa equals any of the naturally occurring L-amino acids
  SITE (463): Xaa equals any of the naturally occurring L-amino acids
MSWPRRLLLRYLFPALLLHGLGEGSALLHPDSRSHPRSLEKSAWRAFKESQCHHMLKHLHNGARITVQMPPTIEGHWVSTGCEVRSGPEFITRSYRFYHNNTFKAYQFYYGSNRCTNPTYTLIIRGKIRLRQASWIIRGGTEADYQLHNVQVICHTEAVAEKLGQQVNRTCPGFLADGGPWVQDVAYDLWREENGCECTKAVNFAMHELQLIRVEKQYLHHNLDHLVEELFLGDIHTDATQRMFYRPSSYQPPLQNAKNHDHACIACXIIYRSDEHHPPILPPKADLTIGLHGEWVSQRCEVRPEVLFLTRHFIFHDNNNTWEGHYYHYSDPVCKHPTFSIYARGRYSRGVLSSRVMGGTEFVFKVNHMKVTPMDAATASLLNVFNGNECGAEGSWQVGIQQDVTHTNGCVALGIKLPHTEYEIFKMEQDARGRYLLFNGQRPSDGSSPDRPRRKKGXKXXKXAPP

SEQ ID NO: 1217 - protein, 514 aa, Homo sapiens
MSWPRRLLLRYLFPALLLHGLGEGSALLHPDSRSHPRSLEKSAWRAFKESQCHHMLKHLHNGARITVQMPPTIEGHWVSTGCEVRSGPEFITRSYRFYHNNTFKAYQFYYGSNRCTNPTYTLIIRGKIRLRQASWIIRGGTEADYQLHNVQVICHTEAVAEKLGQQVNRTCPGFLADGGPWVQDVAYDLWREENGCECTKAVNFAMHELQLIRVEKQYLHHNLDHLVEELFLGDIHTDATQRMFYRPSSYQPPLQNAKNHDHACIACRIIYRSDEHHPPILPPKADLTIGLHGEWVSQRCEVRPEVLFLTRHFIFHDNNNTWEGHYYHYSDPVCKHPTFSIYARGRYSRGVLSSRVMGGTEFVFKVNHMKVTPMDAATASLLNVFNGNECGAEGSWQVGIQQDVTHTNGCVALGIKLPHTEYEIFKMEQDARGRYLLFNGQRPSDGSSPDRPEKRATSYQMPLVQCASSSPRAEDLAEDSGSSLYGRAPGRHTWSLLLAALACLVPLLHWNIRR

SEQ ID NO: 1218 - protein, 36 aa, Homo sapiens
MNNSIAAQASKFVILYLFILSFPKQCICHILSEMVW

SEQ ID NO: 1219 - protein, 101 aa, Homo sapiens [sequence omitted]

SEQ ID NO: 1220 - protein, 178 aa, Homo sapiens
HLLEVTPCRLPVPEFPGRTPRGSRTPDMRRLLLVTSLVVVLLWEAGAVPAPKVPIKMQVKHWPSEQDPEKAWGARVVEPPEKDDQLVVLFPVQKPKLLTTEEKPRGQGRGPILPGTKAWMETEDTLGRVLSPEPDHDSLYHPPPEEDQGEERPRLWVMPNHQVLLGPEEDQDHIYHPQ

SEQ ID NO: 1221 - protein, 40 aa, Homo sapiens
MNNSIAAQASKFVILYLFILSFPKQCICHILVRWSGKSHF

SEQ ID NO: 1222 - protein, 39 aa, Homo sapiens [sequence omitted]

SEQ ID NO: 1223 - protein, 54 aa, Homo sapiens
GTLQRGFLLCSLVPGWGWGTPAALTDGSPFSLSGHPSPTLTCTKFSPQLLCVAP

SEQ ID NO: 1224 - protein, 39 aa, Homo sapiens [sequence omitted]

SEQ ID NO: 1225 - protein, 167 aa, Homo sapiens
  SITE (165): Xaa equals any of the naturally occurring L-amino acids
MSLYLCVSLLISLSLSLNVSVSVSLRLCLYFSPPLSDAISLCLSLSLSVSPFLSPSLALCFLCLCLFLAQSRALGMRTRVSQGWLQLDTSGIPASPGPSKGERYVTFGVVGGAGSNLAVHSARPLIGNLLSVGPTSTLTPTRGLSWQSIAASPSSTGHAKFRETXKN

SEQ ID NO: 1226 - protein, 71 aa, Homo sapiens
  SITE (4): Xaa equals any of the naturally occurring L-amino acids
  SITE (60): Xaa equals any of the naturally occurring L-amino acids
QLRXLRDSIPEQFCNRLKAPGNRTHISGCLGGGQDLGGPERVFWDDGIFCILTVWCLHRXQHLSEINGLSL

SEQ ID NO: 1227 - protein, 114 aa, Homo sapiens
MSLYLCVSLLISLSLSLNVSVSVSLRLCLYFSPPLSDAISLCLSLSLSVSPFLSPSLALCFLCLCLFLAQSRALGMRTRVSQGWLQLDTSGIPASPGPSKGERYVYFRGGRGCG

SEQ ID NO: 1228 - protein, 123 aa, Homo sapiens
  SITE (5): Xaa equals any of the naturally occurring L-amino acids
MAALXTVLFTGVRRLHCSAAAWAGGQWRLQQGLAANPSGYGPLTELPDWSYADGRPAPPMKGQLRRKAERETFARRVVLLSQEMDAGLQAWQLRQQKLQEEQRKQENALKPKGASLKSPLPSQ

SEQ ID NO: 1229 - protein, 123 aa, Homo sapiens [sequence omitted]

SEQ ID NO: 1230 - protein, 128 aa, Homo sapiens
MGSAPWAPVLLLALGLRGLQAGARRAPDPGFQERFFQQRLDHFNFERFGNKTFPQRFLVSDRFWVRGEGPIFFYTGNEGDVWAFANNSAFVAELAAERGALLVFAEHRYYGKSLPFGAQSTQRGTRSC

SEQ ID NO: 1231 - protein, 492 aa, Homo sapiens [sequence omitted]

SEQ ID NO: 1232 - protein, 492 aa, Homo sapiens
  SITE (89): Xaa equals any of the naturally occurring L-amino acids
MGSAPWAPVLLLALGLRGLQAGARRAPDPGFQERFFQQRLDHFNFERFGNKTFPQRFLVSDRFWVRGEGPIFFYTGNEGDVWAFANNSXFVAELAAERGALLVFAEHRYYGKSLPFGAQSTQRGHTELLTVEQALADFAELLRALRRDLGAQDAPAIAFGGSYGGMLSAYLRMKYPHLVAGALAASAPVLAVAGLGDSNQFFRDVTADFEGQSPKCTQGVREAFRQIKDLFLQGAYDTVRWEFGTCQPLSDEKDLTQLFMFARNAFTVLAMMDYPYPTDFLGPLPANPVKVGCDRLLSEAQRITGLRALAGLVYNASGSEHCYDIYRLYHSCADPTGCGTGPDARAWDYQACTEINLTFASNNVTDMFPDLPFTDELRQRYCLDTWGVWPRPDWLLTSFWGGDLRAASNIIFSNGNLDPWAGGGIRRNLSASVIAVTIQGGAHHLDLRASHPEDPASVVEARKLEATIIGEWVKAARREQQPALRGGPRLSL

SEQ ID NO: 1233 - protein, 184 aa, Homo sapiens [sequence omitted]

SEQ ID NO: 1234 - protein, 130 aa, Homo sapiens
MFLELSQALLLLGLPRAPTLFPALPEGPTSLGEQWPPQLPPHLGAPPAAEGAVAMVGCGEGRGGKPLCCSPAQSPAQRVRSGGDKEPITTTEVSLILLHSRCFNLTKLKKTAFAMKKKKKKKKKKKKKKK

SEQ ID NO: 1235 - protein, 133 aa, Homo sapiens
MFLELSQALLLLGLPRAPTLFPALPEGPTSLGEQWPPQLPPHLGAPPAAEGAVAMVGCGEGRGGKPLCCSPAQSPAQRVRSGGDKEPITTTEVSLILLHSRCFNLTKLKKTAFAMKKKKKKKKKKKKKKKKKK

SEQ ID NO: 1236 - protein, 399 aa, Homo sapiens
MGILLGLLLLGHLTVDTYGRPILEVPESVTGPWKGDVNLPCTYDPLQGYTQVLVKWLVQRGSDPVTIFLRDSSGDHIQQAKYQGRLHVSHKVPGDVSLQLSTLEMDDRSHYTCEVTWQTPDGNQVVRDKITELRVQKLSVSKPTVTTGSGYGFTVPQGMRISLQCQARGSPPISYIWYKQQTNNQEPIKVATLSTLLFKPAVIADSGSYFCTAKGQVGSEQHSDIVKFVVKDSSKLLKTKTEAPTTMTYPLKATSTVKQSWDWTTDMDGYLGETSAGPGKSLPVFAIILIISLCCMVVFTMAYIMLCRKTSQQEHVYEAARAHAREANDSGETMRVAIFASGCSSDEPTSQNLGNNYSDEPCIGQEYQIIAQINGNYARLLDTVPLDYEFLATEGKSVC

SEQ ID NO: 1237 - protein, 399 aa, Homo sapiens; identical to SEQ ID NO: 1236

SEQ ID NO: 1238 - protein, 209 aa, Homo sapiens
  SITE (15): Xaa equals any of the naturally occurring L-amino acids
  SITE (18): Xaa equals any of the naturally occurring L-amino acids
  SITE (128): Xaa equals any of the naturally occurring L-amino acids
  SITE (147): Xaa equals any of the naturally occurring L-amino acids
  SITE (152): Xaa equals any of the naturally occurring L-amino acids
MAKFRRRTCIILALXILXIFSLMMGLKMLRPNTATFGAPFGLDLLPELHQRTIHLGKNFDFQKSDRINSETNTKNLKSVEITMKPSKASELNLDELPPLNNYLHVFYYSWYGNPQFDGKYIHWNHPVXEHWDPRIAKNYPQGRHNPXDDIGXSFYPELGSYSSRDPSVIETHMRQMRSASIGNYCIYIYMCVFVSVYMHINDFLCNFNS

SEQ ID NO: 1239 - protein, 81 aa, Homo sapiens [sequence omitted]

SEQ ID NO: 1240 - protein, 133 aa, Homo sapiens
MAKFRRRTCIILALFILFIFSLMMGLKMLRPNTATFGAPFGLDLLPELHQRTIHLGKNFDFQKSDRINSETNTKNLKSVEITMKPSKASELNLDELPPLNNYLHVFYYSWYGNPQFDGKYIHWNHPVLEHWDP

SEQ ID NO: 1241 - protein, 886 aa, Homo sapiens; identical to SEQ ID NO: 905
  SITE (26): Xaa equals any of the naturally occurring L-amino acids
  SITE (216): Xaa equals any of the naturally occurring L-amino acids
  SITE (234): Xaa equals any of the naturally occurring L-amino acids
  SITE (275): Xaa equals any of the naturally occurring L-amino acids
  SITE (871): Xaa equals any of the naturally occurring L-amino acids

SEQ ID NO: 1242 - protein, 831 aa, Homo sapiens
MAARGRGLLLLTLSVLLAAGPSAAAAKLNIPKVLLPFTRATRVNFTLEASEGCYRWLSTRPEVASIEPLGLDEQQCSQKAVVQARLTQPARLTSIIFAEDITTGQVLRCDAIVDLIHDIQIVSTTRELYLEDSPLELKIQALDSEGNTFSTLAGLVFEWTIVKDSEADRFSDSHNALRILTFLESTYIPPSYISEMEKAAKQGDTILVSGMKTGSSKLKARIQEAVYKNVRPAEVRLLILENILLNPAYDVYLMVGTSIHYKVQKIRQGKITELSMPSDQYELQLQNSIPGPEGDPTRPVAVLAQDTSMVTALQLGQSSLVLGHRSIRMQGASRLPNSTIYVVEPGYLGFTVHPGDRWVLETGRLYEITIEVFDKFSNKVYVSDNIRIETVLPAEFFEVLSSSQNGSYHRIRALKRGQTAIDAALTSVVDQDGGVHILQVPVWNQQEVEIHIPITLYPSILTFPWQPKTGAYQYTIRAHGGSGNFSWSSSSHLVATVTVKGVMTTGSDIGFSVIQAHDVQNPLHFGEMKVYVIEPHSMEFAPCQVEARVGQALELPLRISGLMPGGASEVVTLSDCSHFDLAVEVENQGVFQPLPGRLPPGSEHCSGVRVKAEAQGSTTLLVSYRHGHVHLSAKITIAAYLPLKAVDPSSVALVTLGSSKEMLFEGGPRPWILEPSKFFQNVTAEDTDSIGLALFAPHSSRNYQQHWILVTCQALGEQVIALSVGNKPSLTNPFPAVEPAVVKFVCAPPSRLTLVPVYTSPQLDMSCPLLQQNKQVVPVSSHRNPLLDLAAYDQEGRRFDNFSSLSIQWESTRPVLAASSLSCHAAGVPGR

SEQ ID NO: 1243 - protein, 89 aa, Homo sapiens
  SITE (39): Xaa equals any of the naturally occurring L-amino acids
  SITE (65): Xaa equals any of the naturally occurring L-amino acids
MPVPLLASAAWCHLCAGALPAWLWLPGGQLLHNGTCVPXTACPCTQHSLPWGLTLTLEEQAQELXPGTVLTRNCTPLCLPLWSLQLLPR

SEQ ID NO: 1244 - protein, 79 aa, Homo sapiens; identical to SEQ ID NO: 549

SEQ ID NO: 1245 - protein, 89 aa, Homo sapiens; identical to SEQ ID NO: 550

SEQ ID NO: 1246 - protein, 334 aa, Homo sapiens
  SITE (124): Xaa equals any of the naturally occurring L-amino acids
  SITE (129): Xaa equals any of the naturally occurring L-amino acids
  SITE (214): Xaa equals any of the naturally occurring L-amino acids
  SITE (224): Xaa equals any of the naturally occurring L-amino acids
MDQALSLWFLLGWIGGDSCNLIGSFLADQLPLQTYTAVYYVLADLVMLTLYFYYKFRTRPSLLSAPINSVLLFLMGMACATPLLSAAGPVAAPREAFRGRALLSVESGSKPFTRQEVIGFVIGXISSVXYLLSRLPQIRTNFLRKSTQGISYSLFALVMLGNTLYGLSVLLKNPEEGQSEGSYLLHHLPWLVGSLGVLLLDTIISIQFLVYRRXPPPRSLSPSXPADQNQAERRRTGTTGCHTRQEEVWTVMVRRPCISLRVASGSSVDRTVPPGTHLQVDPEASRPGLERRPQGLSGDSEAAPPTTYLILPTQDCPVNSRQLNKQAGYSGSHL

SEQ ID NO: 1247 - protein, 226 aa, Homo sapiens
MDQALSLWFLLGWIGGDSCNLIGSFLADQLPLQTYTAVYYVLADLVMLTLYFYYKFRTRPSLLSAPINSVLLFLMGMACATPLLSAAGPVAAPREAFRGRALLSVESGSKPFTRQEVIGFVIGSISSVLYLLSRLPQIRTNFLRKSTQGISYSLFALVMLGNTLYGLSVLLKNPEEGQSEGSYLLHHLPWLVGSLGVLLLDTIISIQFLVYRRSTAASELEPLLPS

SEQ ID NO: 1248 - protein, 184 aa, Homo sapiens
MKILVAFLVVLTIFGIQSHGYEVFNIISPSNNGGNVQETVTIDNEKNTAIINIHAGSCSSTTIFDYKHGYIASRVLSRRACFILKMDHQNIPPLNNLQWYIYEKQALDNMFSSKYTWVKYNPLESLIKDVDWFLLGSPIEKLCKHIPLYKGEVVENTHNVGAGGCAKAGLLGILGISICADIHV

SEQ ID NO: 1249 - protein, 184 aa, Homo sapiens; identical to SEQ ID NO: 1248

SEQ ID NO: 1250 - protein, 173 aa, Homo sapiens
MAVRALKLLTTLLAVVAAASQAEVESEAGWGMVTPDLLFAEGTAAYARGDWPGVVLSMERALRSRAALRALRLRCRTQCAADFPWELDPDWSPSPAQASGAAALRDLSFFGGLLRRAACLRRCLGPPAATRSAKRWSWSSASGPLQLPAGRLLQDQQVGESCCCSTHLLRGQS

SEQ ID NO: 1251 - protein, 359 aa, Homo sapiens
MAVRALKLLTTLLAVVAAASQAEVESEAGWGMVTPDLLFAEGTAAYARGDWPGVVLSMERALRSRAALRALRLRCRTQCAADFPWELDPDWSPSPAQASGAAALRDLSFFGGLLRRAACLRRCLGPPAAHSLSEEMELEFRKRSPYNYLQVAYFKINKLEKAVAAAHTFFVGNPEHMEMQQNLDYYQTMSGVKEADFKDLETQPHMQEFRLGVRLYSEEQPQEAVPHLEAALQEYFVAYEECRALCEGPYDYDGYNYLEYNADLFQAITDHYIQVLNCKQNCVTELASHPSREKPFEDFLPSHYNYLQFAYYNIGNYTQAVECAKTYLLFFPNDEVMNQNLALLCSYAWRRTHQIHRPP

SEQ ID NO: 1252 - protein, 77 aa, Homo sapiens
MTIFTPFLVLLLLVNSPRFSTITLMRSGFHNPSVCLSFTLKPQCYLVLMYQKNRRQDGSKVFFKTARLKFYLNITAK

SEQ ID NO: 1253 - protein, 77 aa, Homo sapiens; identical to SEQ ID NO: 1252

SEQ ID NO: 1254 - protein, 140 aa, Homo sapiens
  SITE (136): Xaa equals any of the naturally occurring L-amino acids
MASLGLQLVGYILGLLGLLGTLVAMLLPSWKTSSYVGASIVTAVGFSKGLWMECATHSTGITQCDIYSTLLGLPADIQAAQAMMVTSSAISSLACIISVVGMRCTVFCQESRAKDRVAVAGGVFFILGSLLGFIPXAWNL

SEQ ID NO: 1255 - protein, 86 aa, Homo sapiens
  SITE (33): Xaa equals any of the naturally occurring L-amino acids
  SITE (43): Xaa equals any of the naturally occurring L-amino acids
RRFYSPLVPDSMKFEIGEALYLGIISSLFSLIXGIILCFSCSXQRNRSNYYDAYQAQPLATRSSPRPGQPPKVKSEFNSYSLTGYV

SEQ ID NO: 1256 - protein, 230 aa, Homo sapiens
MASLGLQLVGYILGLLGLLGTLVAMLLPSWKTSSYVGASIVTAVGFSKGLWMECATHSTGITQCDIYSTLLGLPADIQAAQAMMVTSSAISSLACIISVVGMRCTVFCQESRAKDRVAVAGGVFFILGGLLGFIPVAWNLHGILRDFYSPLVPDSMKFEIGEALYLGIISSLFSLIAGIILCFSCSSQRNRSNYYDAYQAQPLATRSSPRPGQPPKVKSEFNSYSLTGYV

SEQ ID NO: 1257 - protein, 331 aa, Homo sapiens
MWLWEDQGGLLGPFSFLLLVLLLVTRSPVNACLLTGSLFVLLRVFSFEPVPSCRALQVLKPRDRISAIAHRGGSHDAPENTLAAIRQAAKNGATGVELDIEFTSDGIPVLMHDNTVDRTTDGTGRLCDLTFEQIRKLNPAANHRLRNDFPDEKIPTLREAVAECLNHNLTIFFDVKGHAHKATEALKKMYMEFPQLYNNSVVCSFLPEVIYKMRQTDRDVITALTHRPWSLSHTGDGKPRYDTFWKHFIFVMMDILLDWSMHNILWYLCGISAFLMQKDFVSPAYLKKWSAKGIQVVGWTVNTFDEKSYYESHLGSSYITDSMVEDCEPHF

SEQ ID NO: 1258 - protein, 27 aa, Homo sapiens
GTPAGTGPEFPGRPTRPIGVHLHSVRD

SEQ ID NO: 1259 - protein, 485 aa, Homo sapiens
ARGRLLPWWLAAGCSMSRLGALGGARAGLGLLLGTAAGLGFLCLLYSQRWKRTQRHGRSQSLPNSLDYTQTSDPGRHVMLLRAVPGGAGDASVLPSLPREGQEKVLDRLDFVLTSLVALRREVEELRSSLRGLAGEIVGEVRCHMEENQRVARRRRFPFVRERSDSTGSSSVYFTASSGATFTDAESEGGYTTANAESDNERDSDKESEDGEDEVSCETVKMGRKDSLDLEEEAASGASSALEAGGSSGLEDVLPLLQQADELHRGDEQGKREGFQLLLNNKLVYGSRQDFLWRLARAYSDMCELTEEVSEKKSYALDGKEEAEAALEKGDESADCHLWYAVLCGQLAEHESIQRRIQSGFSFKEHVDKAIALQPENPMAHFLLGRWCYQVSHLSWLEKKTATALLESPLSATVEDALQSFLKAEELQPGFSKAGRVYISKCYRELGKNSEARWWMKLALELPDVTKEDLAIQKDLEELEVILRD

SEQ ID NO: 1260 - protein, 470 aa, Homo sapiens
MSRLGALGGARAGLGLLLGTAAGLGFLCLLYSQRWKRTQRHGRSQSLPNSLDYTQTSDPGRHVMLLRAVPGGAGDASVLPSLPREGQEKVLDRLDFVLTSLVALRREVEELRSSLRGLAGEIVGEVRCHMEENQRVARRRRFPFVRERSDSTGSSSVYFTASSGATFTDAESEGGYTTANAESDNERDSDKESEDGEDEVSCETVKMGRKDSLDLEEEAASGASSALEAGGSSGLEDVLPLLQQADELHRGDEQGKREGFQLLLNNKLVYGSRQDFLWRLARAYSDMCELTEEVSEKKSYALDGKEEAEAALEKGDESADCHLWYAVLCGQLAEHESIQRRIQSGFSFKEHVDKAIALQPENPMAHFLLGRWCYQVSHLSWLEKKTATALLESPLSATVEDALQSFLKAEELQPGFSKAGRVYISKCYRELGKNSEARWWMKLALELPDVTKEDLAIQKDLEELEVILRD

SEQ ID NO: 1261 - protein, 37 aa, Homo sapiens
MPDKREATAAAVALFIVPLGVWMRGSRGYSAAHEGSL

SEQ ID NO: 1262 - protein, 37 aa, Homo sapiens; identical to SEQ ID NO: 1261

SEQ ID NO: 1263 - protein, 105 aa, Homo sapiens [sequence omitted]

SEQ ID NO: 1264 - protein, 105 aa, Homo sapiens [sequence omitted]

SEQ ID NO: 1265 - protein, 101 aa, Homo sapiens
  SITE (101): Xaa equals any of the naturally occurring L-amino acids
MTLCLVTFLTSLPTSVPACTSCWPGFMRSSKNAYDTHHWGGQRSMNLESLTCGQLAIRWTRGWMTRPRQVWAMPGQTVDVYLGRMLQGVVLRGQTLRGRAX

SEQ ID NO: 1266 - protein, 50 aa, Homo sapiens
KAVTGWAHWLTPIIPALWEAKAGRSLEVRISRPAWSTWQNLVSTKNTKIR

SEQ ID NO: 1267 - protein, 120 aa, Homo sapiens
EVLFSNDSVLGHFPHQSPNERARLYFLLAWFHAIIQERLRYAPLGWSKKYEFGESDLRSACDTVDTWLDDTAKASVGHARTDSGRVSGKDAAGRGAERPDSAWKSELTPRDRQSLAGHGE

SEQ ID NO: 1268 - protein, 103 aa, Homo sapiens
MMCVVLTTLPCLTFSIAVTEVQKSINGSADVLPDMLPDLPVSLVLLSLIMVDIIEKLRIYPLRGSQKSSENGHIHSTSLQHIKTVTEQVRQSPENAASPQATN

SEQ ID NO: 1269 - protein, 261 aa, Homo sapiens
MMCVVLTTLPCLTFSIAVTEVQKSINGSADVLPDMLPDLPVSLVLLSLIMVDIIEKLRIYPLRGSQKSSENGHIHSTSLQHIKTVTEQVRQSPENAASPQATNSTQVSQPSGAMTRSQESVFMGPQEPSCDSGILRMMSRRDVRAELFLWSFLLWSDTIEMVRVAGHPNVYKSSWLYPVYIFSFISLLRITFTPQNPLLNSLSVLLQDLPFVFVRLGLIIALGTITPVLGLCKNILVTLSYIYFNYLTRIRIFSAFEMSPF

SEQ ID NO: 1270 - protein, 277 aa, Homo sapiens
  SITE (158): Xaa equals any of the naturally occurring L-amino acids
  SITE (277): Xaa equals any of the naturally occurring L-amino acids
MGLRSWLAAPWGALPPRPPLLLLLLLLLLLQPPPPTWALSPRISLPLGSEERPFLRFEAEHISNYTALLLSRDGRTLYVGAREALFALSSNLSFLPGGEYQELLWGADAEKKQQCSFKGKDPQRDCQNYIKILLPLSGSHLFTCGTAAFSPMCTYINXENFTLARDEKGNVLLEDGKGRCPFDPNFKSTALVVDGELYTGTVSSFQGNDPAISRSQSLRPTKTESSLNWLQDPAFVASAYIPESLGSLQGDDDKIYFFFSETGQEFEFFENTIVSGX

SEQ ID NO: 1271 - protein, 832 aa, Homo sapiens
MGLRSWLAAPWGALPPRPPLLLLLLLLLLLQPPPPTWALSPRISLPLGSEERPFLRFEAEHISNYTALLLSRDGRTLYVGAREALFALSSNLSFLPGGEYQELLWGADAEKKQQCSFKGKDPQRDCQNYIKILLPLSGSHLFTCGTAAFSPMCTYINMENFTLARDEKGNVLLEDGKGRCPFDPNFKSTALVVDGELYTGTVSSFQGNDPAISRSQSLRPTKTESSLNWLQDPAFVASAYIPESLGSLQGDDDKIYFFFSETGQEFEFFENTIVSRIARICKGDEGGERVLQQRWTSFLKAQLLCSRPDDGFPFNVLQDVFTLSPSPQDWRDTLFYGVFTSQWHRGTTEGSAVCVFTMKDVQRVFSGLYKEVNRETQQWYTVTHPVPTPRPGACITNSARERKINSSLQLPDRVLNFLKDHFLMDGQVRSRMLLLQPQARYQRVAVHRVPGLHHTYDVLFLGTGDGRLHKAVSVGPRVHIIEELQIFSSGQPVQNLLLDTHRGLLYAASHSGVVQVPMANCSLYRSCGDCLLARDPYCAWSGSSCKHVSLYQPQLATRPWIQDIEGASAKDLCSASSVVSPSFVPTGEKPCEQVQFQPNTVNTLACPLLSNLATRLWLRNGAPVNASASCHVLPTGDLLLVGTQQLGEFQCWSLEEGFQQLVASYCPEVVEDGVADQTDEGGSVPVIISTSRVSAPAGGKASWGADRSYWKEFLVMCTLFVLAVLLPVLFLLYRHRNSMKVFLKQGECASVHPKTCPVVLPPETRPLNGLGPPSTPLDHRGYQSLSDSPPGARVFTESEKRPLSIQDSFVEVSPVCPRPRVRLGSEIRDSVV

SEQ ID NO: 1272 - protein, 196 aa, Homo sapiens
  SITE (12): Xaa equals any of the naturally occurring L-amino acids
  SITE (22): Xaa equals any of the naturally occurring L-amino acids
  SITE (55): Xaa equals any of the naturally occurring L-amino acids
  SITE (147): Xaa equals any of the naturally occurring L-amino acids
  SITE (156): Xaa equals any of the naturally occurring L-amino acids
  SITE (184): Xaa equals any of the naturally occurring L-amino acids
MGKWKESLQNAXHLPPILLLRXIHLFCAVLAGGKENGQMAVSDGSVKGLLSVVRXWSRGPAPDPCLVPLALEALVGAVHVLHASRAPPRGPELRALLESYFHVLNADWPAGLSSGPEEALVTLRVSMLDAIPMMLHVKTGQCLQPPXSATIALNTXLGSFKNKQGSWTKTQTHCSPCSQSADLXHEVTPLGPRRWL

SEQ ID NO: 1273 - protein, 347 aa, Homo sapiens [sequence omitted]

SEQ ID NO: 1274 - protein, 347 aa, Homo sapiens [sequence omitted]

SEQ ID NO: 1275 - protein, 347 aa, Homo sapiens [sequence omitted]

SEQ ID NO: 1276 - protein, 286 aa, Homo sapiens
  SITE (173): Xaa equals any of the naturally occurring L-amino acids
MLMLMLLMMFAVHCTWVTSNAYSSPSVVLASYNHDGTRNILDDFREAYFWLRQNTDEHARVMSWWDYGYQIAGMANRTTLVDNNTWNNSHIALVGKAMSSNETAAYKIMRTLDVDYVLVIFGGVIGYSGDDINKFLWMVRIAEGEHPKDIRESDYFTPQGEFRVDKAGSPTLXNCLMYKMSYYRFGEMQLDFRTPPGFDRTRNAEIGNKDIKFKHLEEAFTSEHWLVRIYKVKAPDNRETLDHKPRVTNIFPKQKYLSKKTTKRKRGYIKNKLVFKKGKKISKKTV

SEQ ID NO: 1277 - protein, 286 aa, Homo sapiens
MLMLMLLMMFAVHCTWVTSNAYSSPSVVLASYNHDGTRNILDDFREAYFWLRQNTDEHARVMSWWDYGYQIAGMANRTTLVDNNTWNNSHIALVGKAMSSNETAAYKIMRTLDVDYVLVIFGGVIGYSGDDINKFLWMVRIAEGEHPKDIRESDYFTPQGEFRVDKAGSPTLLNCLMYKMSYYRFGEMQLDFRTPPGFDRTRNAEIGNKDIKFKHLEEAFTSEHWLVRIYKVKAPDNRETLDHKPRVTNIFPKQKYLSKKTTKRKRGYIKNKLVFKKGKKISKKTV

SEQ ID NO: 1278 - protein, 135 aa, Homo sapiens
  SITE (134): Xaa equals any of the naturally occurring L-amino acids
MSALRPLLLLLLPLCPGPGPGPGSEAKVTRSCAETRQVLGARGYSLNLIPPALISGEHLRVCPQEYTCCSSETEQRLIRETEATFRGLVEDSGSFLVHTLAARHRKFDDNPDPGGCPSLLCKAWRLEEMWSSEXA

SEQ ID NO: 1279 - protein, 134 aa, Homo sapiens
MSALRPLLLLLLPLCPGPGPGPGSEAKVTRSCAETRQVLGARGYSLNLIPPALISGEHLRVCPQEYTCCSSETEQRLIRETEATFRGLVEDSGSFLVHTLAARHRKFDDNPDPGGCPSLCAGPGDWKKCGQRCA

SEQ ID NO: 1280 - protein, 52 aa, Homo sapiens
  SITE (4): Xaa equals any of the naturally occurring L-amino acids
  SITE (25): Xaa equals any of the naturally occurring L-amino acids
CALXFEFFFFFFFLRWSLGNKARLXQKKKKKKKTSVGKNMENWNPDTLLVGL

SEQ ID NO: 1281 - protein, 17 aa, Homo sapiens
MRVVSGTLFIHFLVLIF

SEQ ID NO: 1282 - protein, 17 aa, Homo sapiens
MRVVSGTLFIHFLVLIF

SEQ ID NO: 1283 - protein, 182 aa, Homo sapiens
MAKRSRGPGRRCLLALVLFCAWGTLAVVAQKPGAGCPSRCLCFRTTVRCMHLLLEAVPAVAPQTSILDLRFNRIREIQPGAFRRLRNLNTLLLNNNQIKRIPSGAFEDLENLKYLYLHFNQIETLDPDSFQHLPKLERLFLHNNRITHLVPGTFNHLESMKRLRLDSNTLHCDCEILWLRIC

SEQ ID NO: 1284 - protein, 550 aa, Homo sapiens
ALPQQAAVAGIVQRSGKPLLPFATGPPTECMRDENESPIPCFLAGDHRANEQLGLTSMHTLWFREHNRIATELLKLNPHWDGDTIYYETRKIVGAEIQHITYQHWLPKILGEVGMRTLGEYHGYDPGINAGIFNAFATAAFRFGHTLVNPLLYRLDENFQPIAQDHLPLHKAFFSPFRIVNEGGIDPLLRGLFGVAGKMRVPSQLLNTELTERLFSMAHTVALDLAAINIQRGRDHGIPPYHDYRVYCNLSAAHTFEDLKNEIKNPEIREKLKRLYGSTLNIDLFPALVVEDLVPGSRLGPTLMCLLSTQFKRLRDGDRLWYENPGVFSPAQLTQIKQTSLARILCDNADNITRVQSDVFRVAEFPHGYGSCDEIPRVDLRVWQDCCEDCRTRGQFNAFSYHFRGRRSLEFSYQEDKPTKKTRPRKIPSVGRQGEHLSNSTSAFSTRSDASGTNDFREFVLEMQKTITDLRTQIKKLESRLSTTECVDAGGESHANNTKWKKDACTICECKDGQVTCFVEACPPATCAVPVNIPGACCPVCLQKRAEEKP

SEQ ID NO: 1285 - protein, 210 aa, Homo sapiens
  SITE (139): Xaa equals any of the naturally occurring L-amino acids
  SITE (187): Xaa equals any of the naturally occurring L-amino acids
MEAPGPRALRTALCGGCCCLLLCAQLAVAGKGARGFGRGALIRLNIWPAVQGACKQLEVCEHCVEGDRARNLSSCMWEQCRPEEPGHCVAQSEVVKEGCSIYNRSEACPAAHHHPTYEPKTVTTGSPPVPEAHSPGFDXASFIGGVVLVLSLQAVAFFVLTSSRPRTAPTRRCEYLASSKYLSPSSXLVPAHVPFSTQGAVFSTGKPSGR

SEQ ID NO: 1286 - protein, 173 aa, Homo sapiens
MEAPGPRALRTALCGGCCCLLLCAQLAVAGKGARGFGRGALIRLNIWPAVQGACKQLEVCEHCVEGDRARNLSSCMWEQCRPEEPGHCVAQSEVVKEGCSIYNRSEACPAAHHHPTYEPKTVTTGSPPVPEAHSPGFDGASFIGGVVLVLSLQAVAFFVLHFLKAKDSTYQTL

SEQ ID NO: 1287 - protein, 148 aa, Homo sapiens
MTWKIKLRSAVYLSDATVTTLGNLVPFTLTLLCFLLLICSLCKHLKKMQLHGKGSQDPSTKVHIKVLQTVIFFLLLCAIYFLSIMISVWSFGSLENKPVFMFCKAIRFSYPSIHPFILIWGNKKLKQTFLSVLRQVRYWVKGEKPSSP

SEQ ID NO: 1288 - protein, 55 aa, Homo sapiens
NERVLTYSLIGSSIIRKKCTVLFTAKFYLTVLILGVMKFKQCDLNLKKKKKKGRP

SEQ ID NO: 1289 - protein, 273 aa, Homo sapiens
  SITE (200): Xaa equals any of the naturally occurring L-amino acids
MRLPGVPLARPALLLLLPLLAPLLGTGAPAELRVRVRLPDGQVTEESLQADSDADSISLELRKPDGTLVSFTADFKKDVKVFRALILGELEKGQSQFQALCFVTQLQHNEIIPSEAMAKLRQKNPRAVRQAEEVRGLEHLHMDVAVNFSQGALLSPHLHNVCAEAVDAIYTRQEDVRFWLEQGVDSSVFEALPKASEQAXLPRCRQVGDRGKPCVCHYGLSLAWYPCMLKYCHSRDRPTPYKCGIRSCQKSYSFDFYVPQRQLCLWDEDPYPG

SEQ ID NO: 1290 - protein, 273 aa, Homo sapiens
  SITE (217): Xaa equals any of the naturally occurring L-amino acids
MRLPGVPLARPALLLLLPLLAPLLGTGAPAELRVRVRLPDGQVTEESLQADSDADSISLELRKPDGTLVSFTADFKKDVKVFRALILGELEKGQSQFQALCFVTQLQHNEIIPSEAMAKLRQKNPRAVRQAEEVRGLEHLHMDVAVNFSQGALLSPHLHNVCAEAVDAIYTRQEDVRFWLEQGVDSSVFEALPKASEQAELPRCRQVGDRGKPCVCXYGLSLAWYPCMLKYCHSRDRPTPYKCGIRSCQKSYSFDFYVPQRQLCLWDEDPYPG

SEQ ID NO: 1291 - protein, 934 aa, Homo sapiens
  SITE (225): Xaa equals any of the naturally occurring L-amino acids
  SITE (596): Xaa equals any of the naturally occurring L-amino acids
  SITE (852): Xaa equals any of the naturally occurring L-amino acids
MLAGCFLLILGQIVLLPAEARERSRGRSISRGRHARTHPQTALLESSCENKRADLVFIIDSSRSVNTHDYAKVKEFIVDILQFLDIGPDVTRVGLLQYGSTVKNEFSLKTFKRKSEVERAVKRMRHLSTGTMTGLAIQYALNIAFSEAEGARPLRENVPRVIMIVTDGRPQDSVAEVAAKARDTGILIFAIGVGQVDFNTLKSIGSEPHEDHVFLVANFSQIETXTSVFQKKLCTAHMCSTLEHNCAHFCINIPGSYVCRCKQGYILNSDQTTCRIQDLCAMEDHNCEQLCVNVPGSFVCQCYSGYALAEDGKRCVAVDYCASENHGCEHECVNADGSYLCQCHEGFALNPDEKTCTKIDYCASSNHGCQHECVNTDDSYSCHCLKGFTLNPDKKTCRRINYCALNKPGCEHECVNMEESYYCRCHRGYTLDPNGKTCSRVDHCAQQDHGCEQLCLNTEDSFVCQCSEGFLINEDLKTCSRVDYCLLSDHGCEYSCVNMDRSFACQCPEGHVLRSDGKTCAKLDSCALGDHGCEHSCVSSEDSFVCQCFEGYILREDGKTCRRKDVCQAIDHGCEHICVNSDDSYTCECLEGFRLXEDGKRCRRKDVCKSTHHGCEHICVNNGNSYICKCSEGFVLAEDGRRCKKCTEGPIDLVFVIDGSKSLGEENFEVVKQFVTGIIDSLTISPKAARVGLLQYSTQVHTEFTLRNFNSAKDMKKAVAHMKYMGKGSMTGLALKHMFERSFTQGEGARPLSTRVPRAAIVFTDGRAQDDVSEWASKAKANGITMYAVGVGKAIEEELQEIASEPTNKHLFYAEDFSTMDEISEKLKKGICEALEDSDGRQDSPAGELPKXVQQPTVQHRYLFEEDNLLRSTQKLSHSTKPSGSPLEEKHDQCKCENLIMFQNLANEEVRKLTQRLEEMTQRMEALENRLRYR

SEQ ID NO: 1292 - protein, 794 aa, Homo sapiens
MLAGCFLLILGQIVLLPAEARERSRGRSISRGRHARTHPQTALLESSCENKRADLVFIIDSSRSVNTHDYAKVKEFIVDILQFLDIGPDVTRVGLLQYGSTVKNEFSLKTFKRKSEVERAVKRMRHLSTGTMTGLAIQYALNIAFSEAEGARPLRENVPRVIMIVTDGRPQDSVAEVAAKARDTGILIFAIGVGQVDFNTLKSIGSEPHEDHVFLVANFSQIETLTSVFQKKLCTAHMCSTLEHNCAHFCINIPGSYVCRCKQGYILNSDQTTCRIQDLCAMEDHNCEQLCVNVPGSFVCQCYSGYALAEDGKRCVAVDYCASENHGCEHECVNADGSYLCQCHEGFALNPDEKTCTKIDYCASSNHGCQHECVNTDDSYSCHCLKGFTLNPDKKTCRRINYCALNKPGCEHECVNMEESYYCRCHRGYTLDPNGKTCSRVDHCAQQDHGCEQLCLNTEDSFVCQCSEGFLINEDLKTCSRVDYCLLSDHGCEYSCVNMDRSFACQCPEGHVLRSDGKTCAKLDSCALGDHGCEHSCVSSEDSFVCQCFEGYILREDGKTCRRKDVCQAIDHGCEHICVNSDDSYTCECLEGFRLAEDGKRCRRKDVCKSTHHGCEHICVNNGNSYICKCSEGFVLAEDGRRCKKCTEGPIDLVFVIDGSKSLGEENFEVVKQFVTGIIDSLTISPKAARVGLLQYSTQVHTEFTLRNFNSAKDMKKAVAHMKYMGKGSMTGLALKHMFERSFTQGEGARPLSTRVPRAAIVFTDGRAQDDVSEWASKARPWYHYVCCWGRKSH

SEQ ID NO: 1293 - protein, 39 aa, Homo sapiens
MRRPAAVPLLLLLCFGSQRAKAATACGRPRMLNRMVGGQ

SEQ ID NO: 1294 - protein, 290 aa, Homo sapiens
MRRPAAVPLLLLLCFGSQRAKAATACGRPRMLNRMVGGQDTQEGEWPWQVSIQRNGSHFCGGSLIAEQWVLTAAHCFRNTSETSLYQVLLGARQLVQPGPHAMYARVRQVESNPLYQGTASSADVALVELEAPVPFTNYILPVCLPDPSVIFETGMNCWVTGWGSPSEEDLLPEPRILQKLAVPIIDTPKCNLLYSKDTEFGYQPKTIKNDMLCAGFEEGKKDACKGDSGGPLVCLVGQSWLQAGVISWGEGCARQNRPGVYIRVTAHHNWIHRIIPKLQFQPARLGGQK

SEQ ID NO: 1295 - protein, 144 aa, Homo sapiens
  SITE (77): Xaa equals any of the naturally occurring L-amino acids
  SITE (122): Xaa equals any of the naturally occurring L-amino acids
  SITE (141): Xaa equals any of the naturally occurring L-amino acids
MLLGVGLVVLALIAGWVLQQANRSAQQLTATGQSLMQSQRLAKSVSQALVGSPQAFPDVVESSGVLARNVRALNGGXNELDVQALGEPFRPELDAITPLVERAERNAGVVMGQQKILTQVGXALRTIKPPVLGPCWRSRRXSSS

SEQ ID NO: 1296 - protein, 187 aa, Homo sapiens
  SITE (16): Xaa equals any of the naturally occurring L-amino acids
  SITE (72): Xaa equals any of the naturally occurring L-amino acids
TSRVWCPHVRRNRPSXQTAEPCAVNWKACKATVGTIGHGCGPAIALAVAGIFVLLCGVGISRVQLLDSRSRXATAEAQQRDAKRQEQEAKRINDANQAAILRLMNELQSVAEGDLTQEATVTEDITGAIADSVNYTVEESASWWATCRTPRPGWPRPPRRWTAPLRNCWRLRPSSCVKSVKRAVRCS

SEQ ID NO: 1297 - protein, 346 aa, Homo sapiens
MLLGVGLVVLALIAGWVLQQANRSAQQLTATGQSLMQSQRLAKSVSQALVGSPQAFPDVVESSGVLARNVRALNGGDNELDVQALGEPFRPELDAITPLVERAERNAGVVMGQQKILTQVGDALRTINRQSSDLLEIAETVSSLKLQQNAPASEISAAGQLVMLTQRIGKSANEFQTTEGVSPEAVFLLGKDLNSFKEIARGMLDGSADLRLAATRDAQTREQLESLIKLYEQTRTQAGAILGNLQGLVSAREAQSAILADSEPLRRQLEGLQSKLSAQSGMGAASSLRSPSPVSSSCCAAWVFRACSCWTAAAAKPRPKHSSVMPSARNRKPSASTTPTRRPFCD

SEQ ID NO: 1298 - protein, 29 aa, Homo sapiens
MHLVGGTLLVLAPRGAVLPLSSQSMPFLQ

SEQ ID NO: 1299 - protein, 29 aa, Homo sapiens
MHLVGGTLLVLAPRGAVLPLSSQSMPFLQ

SEQ ID NO: 1300 - protein, 299 aa, Homo sapiens
MGTKAQVERKLLCLFILAILLCSLALGSVTVHSSEPEVRIPENNPVKLSCAYSGFSSPRVEWKFDQGDTTRLVCYNNKITASYEDRVTFLPTGITFKSVTREDTGTYTCMVSEEGGNSYGEVKVKLIVLVPPSKPTVNIPSSATIGNRAVLTCSEQDGSPPSEYTWFKDGIVMPTNPKSTRAFSNSSYVLNPTTGELVFDPLSASDTGEYSCEARNGYGTPMTSNAVRMEAVERNVGVIVAAVLVTLILLGILVFGIWFAYSRGHFDRTKKGTSSKKVIYSQPSARSEGEFKQTSSFLV

SEQ ID NO: 1301 - protein, 299 aa, Homo sapiens; identical to SEQ ID NO: 1300

SEQ ID NO: 1302 - protein, 136 aa, Homo sapiens
ARAKPERPAGWAESVLEEDASELEPAFSRTVGTIQHCLHLTSVYTHFLPQRGRPEVTTMPLGLGMTVDYIFFSAESCENGNRTDHRLYRDGTLKLLGRLSLLSEEILWAANGLPNPFCSSDHLCLLASFGMEVTAP

SEQ ID NO: 1303 - protein, 100 aa, Homo sapiens
  SITE (22): Xaa equals any of the naturally occurring L-amino acids
  SITE (83): Xaa equals any of the naturally occurring L-amino acids
  SITE (92): Xaa equals any of the naturally occurring L-amino acids
  SITE (95): Xaa equals any of the naturally occurring L-amino acids
MIASCLCYLLLPATRLFRALSXAFFTCRKNVLLANSSSPQVEGDFAMAPRGPEQEECEGLLQQWREEGLSQVLSTASEGPLIXKGLAQSSLXLLXDNPGE

SEQ ID NO: 1304 - protein, 670 aa, Homo sapiens
MIASCLCYLLLPATRLFRALSDAFFTCRKNVLLANSSSPQVEGDFAMAPRGPEQEECEGLLQQWREEGLSQVLSTASEGPLIDKGLAQSSLALLMDNPGEENAASEDRWSSRQLSDLRAAENLDEPFPEMLGEEPLLEVEGVEGSMWAAIPMQSEPQYADCAALPVGALATEQWEEDPAVLAWSIAPEPVPQEEASIWPFEGLGQLQPPAVEIPYHEILWREWEDFSTQPDAQGLKAGDGPQFQFTLMSYNILAQDLMQQSSELYLHCHPDILNWNYRFVNLMQEFQHWDPDILCLQEVQEDHYWEQLEPSLRMMGFTCFYKRRTGCKTDGCAVCYKPTRFRLLCASPVEYFRPGLELLNRDNVGLVLLLQPLVPEGLGQVSVAPLCVANTHILYNPRRGDVKLAQMAILLAEVDKVARLSDGSHCPIILCGDLNSVPDSPLYNFIRDGELQYHGMPAWKVSGQEDFSHQLYQRKLQAPLWPSSLGITDCCQYVTSCHPKRSERRKYGRDFLLRFRFCSIACQRPVGLVLMEGVTDTKPERPAGWAESVLEEDASELEPAFSRTVGTIQHCLHLTSVYTHFLPQRGRPEVTTMPLGLGMTVDYIFFSAESCENGNRTDHRLYRDGTLKLLGRLSLLSEEILWAANGLPNPFCSSDHLCLLASFGMEVTAP

SEQ ID NO: 1305 - protein, 228 aa, Homo sapiens
  SITE (164): Xaa equals any of the naturally occurring L-amino acids
  SITE (167): Xaa equals any of the naturally occurring L-amino acids
  SITE (200): Xaa equals any of the naturally occurring L-amino acids
  SITE (206): Xaa equals any of the naturally occurring L-amino acids
  SITE (221): Xaa equals any of the naturally occurring L-amino acids
MAAAGSVKAALQVAEVLEAIVSCCVGPEGRQVLCTKPTGEVLLSRNGGRLLEALHLEHPIARMIVDCVSSHLKKTGDGAKTFIIFLCHLLRGLHAITDREKDPLMCENIQTHGRHWKNCSRWKFISQALLTFQTQILDGIMDQYLSRHFLSIFSSAKERTLCRXSLXLLLEAYFCGKVGRNNHKFISQLMCDYFFKCMTXKSGIGXFELGDDHFVKLNVGXLAFLFKF

SEQ ID NO: 1306 - protein, 170 aa, Homo sapiens
MAAAGSVKAALQVAEVLEAIVSCCVGPEGRQVLCTKPTGEVLLSRNGGRLLEALHLEHPIARMIVDCVSSHLKKTGDGAKTFIIFLCHLLRGLHAITDREKDPLMCENIQTHGRHWKNCSRWKFISQALLTFQTQILDGIMDQYLSRHFLSIFSSAKERTLCRSSLESVS

SEQ ID NO: 1307 - protein, 149 aa, Homo sapiens
  SITE (87): Xaa equals any of the naturally occurring L-amino acids
  SITE (95): Xaa equals any of the naturally occurring L-amino acids
  SITE (107): Xaa equals any of the naturally occurring L-amino acids
MGAPLLSPGWGAGAAGRRWWMLLAPLLPALLLVRPAGALVEGLYCGTRDCYEVLGVSRSAGKAEIARAYRQLARRYHPDRYRPQPGXEGPGRTPXSAEEAFLLVATXYETLKDEETRKDYDYMLDHPEEYYSHYYHYYSRRLALRWMLE

SEQ ID NO: 1308 - protein, 360 aa, Homo sapiens
MGAPLLSPGWGAGAAGRRWWMLLAPLLPALLLVRPAGALVEGLYCGTRDCYEVLGVSRSAGKAEIARAYRQLARRYHPDRYRPQPGDEGPGRTPQSAEEAFLLVATAYETLKDEETRKDYDYMLDHPEEYYSHYYHYYSRRLAPKVDVRVVILVSVCAISVFQFFSWWNSYNKAISYLATVPKYRIQATEIAKQQGLLKKAKEKGKNKKSKEEIRDEEENIIKNIIKSKIDIKGGYQKPQICDLLLFQIILAPFHLCSYIVWYCRWIYNFNIKGKEYGEEERLYIIRKSMKMSKSQFDSLEDHQKETFLKRELWIKENYEVYKQEQEEELKKKLANDPRWKRYRRWMKNEGPGRLTFVDD

SEQ ID NO: 1309 - protein, 128 aa, Homo sapiens
  SITE (122): Xaa equals any of the naturally occurring L-amino acids
MESHLSTWPCHPSCCLFLILLFPSHPTSMTKSKARLPHLENCSQNDTSKPLGQARPPSSPTRTTDLTTGPTSSPAPLGILHTAVRVTHLHTLTLMGEEKAVFVARAQVGNLGLVFRKARGSXFPTLGR

SEQ ID NO: 1310 - protein, 112 aa, Homo sapiens
MESHLSTWPCHPSCCLFLILLFPSHPTSMTKSKARLPHLENCSQNDTSKPLGQARPPSSPTRTTDLTTGPTSSPAPLGILHTAVRVTHLHTLTLMGEEKAVFVARAQVGTLA

SEQ ID NO: 1311 - protein, 108 aa, Homo sapiens
MFVSVTAFFFSLLFLGMFLSGMVAQIDANWNFLDFAYHFTVFVFYFGAFLLEAAATSLHDLHCNTTITGQPLLSDNQYNINVAASIFAFMTTACYGCSLGLALRRWRP

SEQ ID NO: 1312 - protein, 77 aa, Homo sapiens
NHIQHKNYFWLNSTEKYFNLPVEILVMERCQTVLNGRTSKSEATVPTTRGLLYCSTFSALYFLAEASPWSAMYKLGY

SEQ ID NO: 1313 - protein, 108 aa, Homo sapiens
MFVSVTAFFFSLLFLGMFLSGMVAQIDANWNFLDFAYHFTVFVFYFGAFLLEAAATSLHDLHCNTTITGQPLLSDNQYNINVAASIFAFMTTAWYGCSLGLALRRWRP

SEQ ID NO: 1314 - protein, 176 aa, Homo sapiens
MSAGGASVPPPPNPAVSFPPPRVTLPAGPDILRTYSGAFVCLEILFGGLVWILVASSNVPLPLLQGWVMFVSVTAFFFSLLFLGMFLSGMVAQIDANWNFLDFAYHFTVFVFYFGAFLLEAAATSLHDLHCNTTITGQPLLSDNQYNINVAASIFAFMTTACYGCSLGLALRRWRP

SEQ ID NO: 1315 - protein, 103 aa, Homo sapiens
MPLCSLLTCLGLNVLFLTLNEGAWYSVGALMISVPALLGYLQEVCRARLPDSELMRRKYHSVRQEDLQRVRLSRPEAVAEVKSFLIQLEAFLKPPVLHMLKPP

SEQ ID NO: 1316 - protein, 237 aa, Homo sapiens
MPLCSLLTCLGLNVLFLTLNEGAWYSVGALMISVPALLGYLQEVCRARLPDSELMRRKYHSVRQEDLQRVRLSRPEAVAEVKSFLIQLEAFLSRLCCTCEAAYRVLHWENPVVSSQFYGALLGTVCMLYLLPLCWVLTLLNSTLFLGNVEFFRVVSEYRASLQQRMNPKQEEHAFESPPPPDVGGKDGLMDSTPALTPTEDLTPGSVEEAEEAEPDEEFKDAIDEDDEGAPCPALFL

SEQ ID NO: 1317 - protein, 165 aa, Homo sapiens
  SITE (54): Xaa equals any of the naturally occurring L-amino acids
  SITE (62): Xaa equals any of the naturally occurring L-amino acids
  SITE (64): Xaa equals any of the naturally occurring L-amino acids
  SITE (96): Xaa equals any of the naturally occurring L-amino acids
MARLGAVRSHYCALLLAAALAVCAFYYLGSGRETFSSATKRLKEARAGAPAAPXPPALELAXGXVAPAPGAKAKSLEGGGAGPVDYHLLMMFTKAXHNAALQAKARVALRSLLRLAKFEAHEVLNLHFVSEEASREVAKGLLRELLPPPLASSARSSSTICCADG

SEQ ID NO: 1318 - protein, 159 aa, Homo sapiens
ASKRMPAHHILTLGGCCTRILLMLTSLGVGFRIASLRKDFRTNWGLHKKTYLIIRVLTACISQLHPRTPLSFIPPNQLQVTRLYSESKFVIKEQRLATTRTCRRTVGTRKTHSKKPRPGTVVKPVIPTLWETEVGVSIEPRRSRSAWETQGGPHRYKIF

SEQ ID NO: 1319 - protein, 380 aa, Homo sapiens
MARLGAVRSHYCALLLAAALAVCAFYYLGSGRETFSSATKRLKEARAGAPAAPSPPALELARGSVAPAPGAKAKSLEGGGAGPVDYHLLMMFTKAEHNAALQAKARVALRSLLRLAKFEAHEVLNLHFVSEEASREVAKGLLRELLPPAAGFKCKVIFHDVAVLTDKLFPIVEAMQKHFSAGLGTYYSDSIFFLSVAMHQIMPKEILQIIQLDLDLKFKTNIRELFEEFDSFLPGAIIGIAREMQPVYRHTFWQFRHENPQTRVGGPPPEGLPGFNSGVMLLNLEAMRQSPLYSRLLEPAQVQQLADKYHFRGHLGDQDFFTMIGMEHPKLFHVLDCTWNRQLCTWWRDHGYSDVFEAYFRCEGHVKIYHGNCNTPIPED

SEQ ID NO: 1320 - protein, 73 aa, Homo sapiens
LESYSSVRELLVSVRFYVVCKVRGSVLFPYLGKSTAGVEGLYVPFNVTVLKDLSRESESFAECDRRLNNLICF

SEQ ID NO: 1321 - protein, 95 aa, Homo sapiens; identical to SEQ ID NO: 1190

SEQ ID NO: 1322 - protein, 234 aa, Homo sapiens; identical to SEQ ID NO: 1191

SEQ ID NO: 1323 - protein, 15 aa, Homo sapiens
NATKSQPCLSSLLLF

SEQ ID NO: 1324 - protein, 62 aa, Homo sapiens
  SITE (3): Xaa equals any of the naturally occurring L-amino acids
KYXKHPSKSFELTLVLRKLSLHNQPPGKTECHLLKSKCCVIITLQTKWRYYLFCKQQTKQNS

SEQ ID NO: 1325 - protein, 15 aa, Homo sapiens
NATKSQPCLSSLLLF

SEQ ID NO: 1326 - protein, 228 aa, Homo sapiens
  SITE (92): Xaa equals any of the naturally occurring L-amino acids
  SITE (134): Xaa equals any of the naturally occurring L-amino acids
  SITE (170): Xaa equals any of the naturally occurring L-amino acids
  SITE (195): Xaa equals any of the naturally occurring L-amino acids
  SITE (205): Xaa equals any of the naturally occurring L-amino acids
  SITE (209): Xaa equals any of the naturally occurring L-amino acids
  SITE (214): Xaa equals any of the naturally occurring L-amino acids
MVPNWIQGRWDVLLCVLTVGVLPSIGSRGGWFGTQVPCLIPGALASLHRGTALQLSYPFSMAGRTAERPCSMTNHSFHLLSIYWELGTVLSXKRVLTHLLQQPGKAGSSVSPCSKLGDLEHRRSSAWLKAHSSXVQILCPSWHPSLGGSGVGSLQSVPGGWMTKLQPSRXPTISIAQWSQKETDHFTDQRNKGAXLLNPGASDRXKPEXRTKKXPVNSEPGETLPFTN

SEQ ID NO: 1327 - protein, 84 aa, Homo sapiens
DNFLLGVAWFFRGRGSAHVGVVSRQKQWEEGTAKHAAWDYGCPQSCSFSKGVFCLFLRQGHTLSPRMECSGPILAHCNLELLGS

SEQ ID NO: 1328 - protein, 174 aa, Homo sapiens [sequence omitted]

SEQ ID NO: 1329 - protein, 115 aa, Homo sapiens
MVPNWIQGRWDVLLCVLTVGVLPSIGSRGGWFGTQVPCLIPGALASLHRGTALQLSYPFSMAGRTAERPCSMTNHSFHLLSIYWELGTVLSVKRVLTHLLQQPGKAVLPLAPAQS

SEQ ID NO: 1330 - protein, 59 aa, Homo sapiens
  SITE (54): Xaa equals any of the naturally occurring L-amino acids
  SITE (56): Xaa equals any of the naturally occurring L-amino acids
MENQMLTCVAIFVLFCFVLFLRQGLALSPRLECSGMIRAYCSLTLDFLGSSNPXTXAPK

SEQ ID NO: 1331 - protein, 59 aa, Homo sapiens
MENQMLTCVAIFVLFCFVLFLRQGLALSPRLECSGMIRAYCSLTLDFLGSSNPPTSAPK

SEQ ID NO: 1332 - protein, 100 aa, Homo sapiens
GSFLSPWGPILWGLGAGVLMGDALQGREGRMQATVGAGPEGSETVAVQVCVIREAVVGEEVSDCVAPLCGVGGQGGAAKEARKMGGGWDGLGSHIHVLDF

SEQ ID NO: 1333 - protein, 99 aa, Homo sapiens
MLILGSMFSLVEPVLTIAAALSVQSPFTRSAQSSPECAAARRPLESDQGDPFTLFNVFNAWVQVKSERSRNSRKWCRRRGIEEHRLYEMANFGASSRTV

SEQ ID NO: 1334 - protein, 163 aa, Homo sapiens [sequence omitted]

SEQ ID NO: 1335 - protein, 552 aa, Homo sapiens
  SITE (142): Xaa equals any of the naturally occurring L-amino acids
MLILGSMFSLVEPVLTIAAALSVQSPFTRSAQSSPECAAARRPLESDQGDPFTLFNVFNAWVQVKSERSRNSRKWCRRRGIEEHRLYEMANLRRQFKELLEDHGLLAGAQAAQVGDSYSRLQQRRERRALHQLKRQHEEGAXCRRKVLRLQEEQDGGSSDEDRAGPAPPGASDGVDIQDVKFKLRHDLAQLQAAASSAQDLSREQLALLKLVLGRGLYPQLAVPDAFNSSRKDSDQIFHTQAKQGAVLHPTCVFAGSPEVLHAQELEASNCDGSRDDKDKMSSKHQLLSFVSLLETNKPYLVNCVRIPALQSLLLFSRSLDTNGDCSRLVADGWLELQLADSESAIRLLAASLRLRARWESALDRQLAHQAQQQLEEEEEDTPVSPKEVATLSKELLQFTASKIPYSLRRLTGLEVQNMYVGPQTIPATPHLPGLFGSSTLSPHPTKGGYAVTDFLTYNCLTNDTDLYSDCLRTFWTCPHCGLHAPLTPLERIAHENTCPQAPQDGPPGAEEAALETLQKTSVLQRPYHCEACGKDFLFTPTEVLRHRKQHV

SEQ ID NO: 1336 - protein, 78 aa, Homo sapiens
MSLYGTRWRISWPHWRRVVLVSLLSSSGGQISPSLSHHLPCSDFFELETSLALFWLTTLVPSITNITRVFTTLLRTLM

SEQ ID NO: 1337 - protein, 78 aa, Homo sapiens; identical to SEQ ID NO: 1336

SEQ ID NO: 1338 - protein, 159 aa, Homo sapiens
MGCLWGLALPLFFFCWEVGVSGSSAGPSTRRADTAMTTDDTEVPAMTLAPGHAALETQTLSAETSSRASTPAGPIPEAETRGAKRISPARETRSFTKTSPNFMVLIATSVETSAASGSPEGARMTTVQTITGSDPRKPSLTPFAPMTALKRQRHSQWTY

SEQ ID NO: 1339 - protein, 149 aa, Homo sapiens
  SITE (114): Xaa equals any of the naturally occurring L-amino acids
  SITE (123): Xaa equals any of the naturally occurring L-amino acids
  SITE (144): Xaa equals any of the naturally occurring L-amino acids
MGCLWGLALPLFFFCWEVGVSGSSAGPSTRRADTAMTTDDTEVPAMTLAPGHAALETQTLSAETSSRASTPAGPIPEAETRGAKRISPARETRSFTKTSPNFMVLIATSVETSXASGSPEGAXMTTVQTITGSDPREAIFDTLXTDDSS

SEQ ID NO: 1340 - protein, 595 aa, Homo sapiens
MGCLWGLALPLFFFCWEVGVSGSSAGPSTRRADTAMTTDDTEVPAMTLAPGHAALETQTLSAETSSRASTPAGPIPEAETRGAKRISPARETRSFTKTSPNFMVLIATSVETSAASGSPEGARMTTVQTITGSDPREAIFDTLCTDDSSEEAKTLTMDILTLAHTSTEAKGLSSESSASSDGPHPVITPSRASESSASSDGPHPVITPSRASESSASSDGPHPVITPSRASESSASSDGPHPVITPSRASESSASSDGPHPVITPSRASESSASSDGPHPVITPSWSPGSDVTLLAEALVSVTNIEVINCSITEIETTTSSIPGASDTDLIPTEGVKASSTSDPPALPDSTEAKPHITEVTASAETLSTAGTTESAAPDATVGTPLPTNSATEREVTAPGATTLSGALVTVSRNPLEETSALSVETPSYVKVSGAAPVSIEAGSAVGKTTSFAGSSASSYSPSEAALKNFTPSETPTMDIATKGPFPTSRDPLPSVPPTTTNSSRGTNSTLAKITTSAKTTMKPPTATPTTARTRPTTDVSAGENGGFLLLRLSVASPEDLTDPRVAERLMQQLHRELHAHAPHFQVSLLRVRRG

SEQ ID NO: 1341 - protein, 114 aa, Homo sapiens
MWNPWIAMCLLGLSYSLLACALWPMVAFVVPEHQLGTAYGFMQSIQNLGLAIISIIAGMILDSRGYLFLEVFFIACVSLSLLSVVLLYLVNRAQGGNLNYSARQREEIKFSHTE

SEQ ID NO: 1342 - protein, 114 aa, Homo sapiens; identical to SEQ ID NO: 1341

SEQ ID NO: 1343 - protein, 114 aa, Homo sapiens; identical to SEQ ID NO: 1341

SEQ ID NO: 1344 - protein, 465 aa, Homo sapiens
MEEEDEEARALLAGGPDEADRGAPAAPGALPALCDPSRLAHRLLVLLLMCFLGFGSYFCYDNPAALQTQVKRDMQVNTTKFMLLYAWYSWPNVVLCFFGGFLIDRVFGIRWGTIIFSCFVCIGQVVFALGGIFNAFWLMEFGRFVFGIGGESLAVAQNTYAVSWFKGKELNLVFGLQLSMARIGSTVNMNLMGWLYSKIEALLGSAGHTTLGITLMIGGITCILSLICALALAYLDQRAERILHKEQGKTGEVIKLTDVKDFSLPLWLIFIICVCYYVAVFPFIGLGKVFFTEKFGFSSQAASAINSVVYVISAPMSPVFGLLVDKTGKNIIWVLCAVAATLVSHMMLAFTMWNPWIAMCLLGLSYSLLACALWPMVAFVVPEHQLGTAYGFMQSIQNLGLAIISIIAGMILDSRGYLFLEVFFIACVSLSLLSVVLLYLVNRAQGGNLNYSARQREEIKFSHTE

SEQ ID NO: 1345 - protein, 83 aa, Homo sapiens
MGLKALPEPFMSLVSHLLRTFFLVWFVGLPVAILGNLLECYANVFTGNGGGPEPWGGHLVSECLALPQLGIQYLALSGGIIWL

SEQ ID NO: 1346 - protein, 73 aa, Homo sapiens [sequence omitted]

SEQ ID NO: 1347 - protein, 83 aa, Homo sapiens; identical to SEQ ID NO: 1345

SEQ ID NO: 1348 - protein, 111 aa, Homo sapiens
MFLARVPFLFTIVPFSVLRSMLSKVVRSTEQGTLFACIAFLETLGGVTAVSTFNGIYSATVAWYPGFTFLLSAGLLLLPAISLCVVKCTSWNEGSYELLIQEESSEDASDR

SEQ ID NO: 1349 - protein, 111 aa, Homo sapiens; identical to SEQ ID NO: 1348

SEQ ID NO: 1350 - protein, 230 aa, Homo sapiens
MSCSEGFKNLFYRTYMLFKNASGKRRFLLCLLLFTVITYFFVVIGIAPIFILYELDSPLCWNEVFIGYGSALGSASFLTSFLGIWLFSYCMEDIHMAFIGIFTTMTGMAMTAFASTTLMMFLARVPFLFTIVPFSVLRSMLSKVVRSTEQGTLFACIAFLETLGGVTAVSTFNGIYSATVAWYPGFTFLLSAGLLLLPAISLCVVKCTSWNEGSYELLIQEESSEDASDR

SEQ ID NO: 1351 - protein, 137 aa, Homo sapiens
  SITE (111): Xaa equals any of the naturally occurring L-amino acids
  SITE (116): Xaa equals any of the naturally occurring L-amino acids
  SITE (123): Xaa equals any of the naturally occurring L-amino acids
MYLQVETRTSSRLHLKRAPGIRSWSLLVGILSIGLAAAYYSGDSLGWKLFYVTGCLFVAVQNLEDWEEAIFDKSTGKVVLKTFSLYKKLLTLFRAGHDQVVVLLHDVRDVXVEEEXVRYFGKXYMVVLRLATGFFHP

SEQ ID NO: 1352 - protein, 124 aa, Homo sapiens
MYLQVETRTSSRLHLKRAPGIRSWSLLVGILSIGLAAAYYSGDSLGWKLFYVTGCLFVAVQNLEDWEEAIFDKSTGKVVLKTFSLYKKLLTLFRAGHDQVVVLLHDVRSGCQSLVAGQGHHNHK

SEQ ID NO: 1353 - protein, 145 aa, Homo sapiens
  SITE (123): Xaa equals any of the naturally occurring L-amino acids
  SITE (135): Xaa equals any of the naturally occurring L-amino acids
  SITE (137): Xaa equals any of the naturally occurring L-amino acids
MYLQVETRTSSRLHLKRAPGIRSWSLLVGILSIGLAAAYYSGDSLGWKLFYVTGCLFVAVQNLEDWEEAIFDKSTGKVVLKTFSLYKKLLTLFRAGHDQVVVLLHDVRDVSVEEEKVRYFGKXYMVVLRLATGFXHXLTQSADMG

SEQ ID NO: 1354 - protein, 89 aa, Homo sapiens
  SITE (24): Xaa equals any of the naturally occurring L-amino acids
  SITE (75): Xaa equals any of the naturally occurring L-amino acids
MFKDYPPAIKPSYDVLLLLLLLVXLLQAGLNTGTAIQCVRFKVSARLQGASWDTQNGPQERLAGEVARSPLKEFXKEKAWRAVVVQMAQ

SEQ ID NO: 1355 - protein, 89 aa, Homo sapiens
MFKDYPPAIKPSYDVLLLLLLLVLLLQAGLNTGTAIQCVRFKVSARLQGASWDTQNGPQERLAGEVARSPLKEFDKEKAWRAVVVQMAQ

SEQ ID NO: 1356 - protein, 419 aa, Homo sapiens
MNNQKQQKPTLSGQRFKTRKRDEKERFDPTQFQDCIIQGLTETGTDLEAVAKFLDASGAKLDYRRYAETLFDILVAGGMLAPGGTLADDMMRTDVCVFAAQEDLETMQAFAQVFNKLIRRYKYLEKGFEDEVKKLLLFLKGFSESERNKLAMLTGVLLANGTLNASILNSLYNENLVKEGVSAAFAVKLFKSWINEKDINAVAASLRKVSMDNRLMELFPANKQSVEHFTKYFTEAGLKELSEYVRNQQTIGARKELQKELQEQMSRGDPFKDIILYVKEEMKKNNIPEPVVIGIVWSSVMSTVEWNKKEELVAEQAIKHLKQYSPLLAAFTTQGQSELTLLLKIQEYCYDNIHFMKAFQKIVVLFYKAEVLSEEPILKWYKDAHVAKGKSVFLEQMKKFVEWLKNAEEESESEAEEGD

SEQ ID NO: 1357 - protein, 19 aa, Homo sapiens
TIACMLTFCFVLFCFVLHF

SEQ ID NO: 1358 - protein, 857 aa, Homo sapiens
MSYYMADRKHRKAFLEARQSLEVKMNLEEQSQQQENLMLSILPKHVADEMLKDMKKDESQKDQQQFNTMYMYRHENVSILFADIVGFTQLSSACSAQELVKLLNELFARFDKLAAKYHQLRIKILGDCYYCICGLPDYREDHAVCSILMGLAMVEAISYVREKTKTGVDMRVGVHTGTVLGGVLGQKRWQYDVWSTDVTVANKMEAGGIPGRVHISQSTMDCLKGEFDVEPGDGGSRCDYLEEKGIETYLIIASKPEVKKTATQNGLNGSALPNGAPASSKSSSPALIETKEPNGSAHSSGSTSEKPEEQDAQADNPSFPNPRRRLRLQDLADRVVDASEDEHELNQLLNEALLERESAQVVKKRNTFLLSMRFMDPEMETRYSVEKEKQSGAAFSCSCVVLLCTALVEILIDPWLMTNYVTFMVGEILLLILTICSLAAIFPRAFPKKLVAFSTWIDRTRWARNTWAMLAIFILVMANVVDMVSHMVKLTLMLLVAGAVATINLYAWRPVFDEYDHKRFREHDLPMVALEQMQGFNPGLNGTDRLPLVPSKYSMTVMVFLMMLSFYYFSRHVEKLARTLFLWKIEVHDQKERVYEMRRWNEALVTNMLPEHVARHFLGSKKRDEELYSQTYDEIGVMFASLPNFADFYTEESINNGGIECLRFLNEIISDFDSLLDNPKFRVITKIKTIGSTYMAASGVTPDVNTNGFASSNKEDKSERERWQHLADLADFALAMKDTLTNINNQSFNNFMLRIGMNKGGVLAGVIGARKPHYDIWGNTVNVASRMESTGVMGNIQVVEETQVILREYGFRFVRRGPIFVKGKGELLTFFLKGRDKLATFPNGPSVTLPHQVVDNS

SEQ ID NO: 1359 - protein, 188 aa, Homo sapiens
MVPGAAGWCCLVLWLPACVAAHGFRIHDYLYFQVLSPGDIRYIFTATPAKDFGGIFHTRYEQIHLVPAEPPEACGELSNGFFIQDQIALVERGGCSFLSKTRVVQEHGGRAVIISDNAVDNDSFYVEMIQDSTQRTADIPALFLLGRDGYMIRRSLEQHGLPWAIISIPVNVTSIPTFELLQPPWTFW

SEQ ID NO: 1360 - protein, 188 aa, Homo sapiens; identical to SEQ ID NO: 1359

SEQ ID NO: 1361 - protein, 116 aa, Homo sapiens
  SITE (28): Xaa equals any of the naturally occurring L-amino acids
  SITE (90): Xaa equals any of the naturally occurring L-amino acids
MRKIHTPLFNLLQVRLGFVYFPCFTFPXVQAVVETGTQGLCVAPCSSCLQEACGALVSLASCPPFLLPPLTLPPTLSLRTSSWKGLARAXVLASLWGGRLCGLKGCRLKLQGVGAW

SEQ ID NO: 1362 - protein, 167 aa, Homo sapiens [sequence omitted]

SEQ ID NO: 1363 - protein, 286 aa, Homo sapiens
  SITE (204): Xaa equals any of the naturally occurring L-amino acids
  SITE (224): Xaa equals any of the naturally occurring L-amino acids
  SITE (228): Xaa equals any of the naturally occurring L-amino acids
  SITE (264): Xaa equals any of the naturally occurring L-amino acids
  SITE (271): Xaa equals any of the naturally occurring L-amino acids
MYLSALQSLIPSLFALVLQNAPFSSKAKLHGEVPQIEVTRFPRPMSPLQDVSTIIGSREQLAVLLQLYDYQLEQEGTTGWESLLWVVNQLLPQLIEIVGKINVTSTACVHEFSRFFWRLCRTFGKIFTNTKVKPQFQEILRLSEENIDSSAGNGVLTKATVPIYATGVLTCYIQEEDRKLLVGFLEDVMTLLSLSHAPLDSLKXSFVELGANQAYHELLLTVLXYGVXHTSALVRCTAARMFELLVKGVNETLVAQRVVPALHXLSPVDPXNLCQDCHNFQPLGLF

SEQ ID NO: 1364 - protein, 283 aa, Homo sapiens
MYLSALQSLIPSLFALVLQNAPFSSKAKLHGEVPQIEVTRFPRPMSPLQDVSTIIGSREQLAVLLQLYDYQLEQEGTTGWESLLWVVNQLLPQLIEIVGKINVTSTACVHEFSRFFWRLCRTFGKIFTNTKVKPQFQEILRLSEENIDSSAGNGVLTKATVPIYATGVLTCYIQEEDRKLLVGFLEDVMTLLSLSHAPLDSLKASFVELGANPAYHELLLTVLWYGVVHTSALVRCTAARMFEVCQHMPLLVSIIMIFFFLRRRREFFLIKRLCISKKKKKKK

SEQ ID NO: 1365 - protein, 379 aa, Homo sapiens
  SITE (283): Xaa equals any of the naturally occurring L-amino acids
  SITE (303): Xaa equals any of the naturally occurring L-amino acids
  SITE (307): Xaa equals any of the naturally occurring L-amino acids
MGYIDDPDKYHQGFELLLSALGDPSERVVSATHQVFLPAYAAWTTELGNLQSHLILTLLNKIEKLLREGEHGLDEHKLHMYLSALQSLIPSLFALVLQNAPFSSKAKLHGEVPQIEVTRFPRPMSPLQDVSTIIGSREQLAVLLQLYDYQLEQEGTTGWESLLWVVNQLLPQLIEIVGKINVTSTACVHEFSRFFWRLCRTFGKIFTNTKVKPQFQEILRLSEENIDSSAGNGVLTKATVPIYATGVLTCYIQEEDRKLLVGFLEDVMTLLSLSHAPLDSLKXSFVELGANQAYHELLLTVLXYGVXHTSALVRCTAARMFELLVKGVNETLVAQRVVPALITLSSDPEISVRIATIPAFGTIMETVIQRELLERVKMQ

SEQ ID NO: 1366 - protein, 156 aa, Homo sapiens
MPALLPVASRLLLLPRVLLTMASGSPPTQPSPASDSGSGYVPGSVSAAFVTCPNEKVAKEIARAVVEKRLAACVNLIPQITSIYEWKGKIEEDSEVLMMIKTQSSLVPALTDFVRSVHPYEVAEVIALPVEQGNFPYLQWVRQVTESVSDSITVLP

SEQ ID NO: 1367 - protein, 156 aa, Homo sapiens; identical to SEQ ID NO: 1366

SEQ ID NO: 1368 - protein, 442 aa, Homo sapiens
  SITE (164): Xaa equals any of the naturally occurring L-amino acids
  SITE (247): Xaa equals any of the naturally occurring L-amino acids
MWRLPGLLGRALPRTLGPSLWRVTPKSTSPDGPQTTSSTLLVPVPNLDRSGPHGPGTSGGPRSHGWKDAFQWMSSRVSPNTLWDAISWGTLAVLALQLARQIHFQASLPAGPQRVEHCSWHSPLDRFFSSPLWHPCSSLRQHILPSPDGPAPRHTGLREPRLGXEEASAQPRNFSHNSLRGARPQDPSEEGPGDFGFLHASSSIESEAKPAQPQPTGEKEQDKSKTLSLEEAVTSIQQLFQLSVSIXFNFLGTENMKSGDHTAAFSYFQKAAARGYSKAQYNAGLCHEHGRGTPRDISKAVLYYQLAASQGHSLAQYRYARCLLRDPASSWNPERQRAVSLLKQAADSGLREAQAFLGVLFTKEPYLDEQRAVKYLWLAANNGDSQSRYHLGICYEKGLGVQRNLGEALRCYQQSAALGNEAAQERLRALFSMGAAAGGPAT

SEQ ID NO: 1369 - protein, 84 aa, Homo sapiens
MGLRLPPPLCWFLCLTSTGQVPMAQARAGVQGPMDGRMPSNGCLPVSPRTPYGMPYLGALWPCWPCSWQGRSTSRHPCQQDLSG

SEQ ID NO: 1370 - protein, 129 aa, Homo sapiens [sequence omitted]

SEQ ID NO: 1371 - protein, 53 aa, Homo sapiens
  SITE (1): Xaa equals any of the naturally occurring L-amino acids
  SITE (2): Xaa equals any of the naturally occurring L-amino acids
  SITE (52): Xaa equals any of the naturally occurring L-amino acids
  SITE (53): Xaa equals any of the naturally occurring L-amino acids
XXDTQGRVRGRHEEWGGRRWRKEGSEQRAPGMAWKRLSPWILWVGASGLTSXX

SEQ ID NO: 1372 - protein, 129 aa, Homo sapiens [sequence omitted]

SEQ ID NO: 1373 - protein, 117 aa, Homo sapiens
  SITE (114): Xaa equals any of the naturally occurring L-amino acids
MGFLFLLGLYISSLASCMGGLYGAPRILQCIAQEKVIPALACLGQGKGPNKTPVAAICLTSLVTMAFVFVGQVNVLAPIVTINFMLTYVAVDYSYFSLSMCSCSLTPVPEPVLXEGA

SEQ ID NO: 1374 - protein, 98 aa, Homo sapiens
  SITE (85): Xaa equals any of the naturally occurring L-amino acids
  SITE (90): Xaa equals any of the naturally occurring L-amino acids
  SITE (97): Xaa equals any of the naturally occurring L-amino acids
QGTPRLCTTRLLVQRATISVCFIFYCIIYSKINNTLTCFHTQKIYRVKSLPPILILHLLSSCLPWPRGNHYSHPYIQHFFMDIQXNGNVXSHISLFXP

SEQ ID NO: 1375 - protein, 407 aa, Homo sapiens
  SITE (114): Xaa equals any of the naturally occurring L-amino acids
MGFLFLLGLYISSLASCMGGLYGAPRILQCIAQEKVIPALACLGQGKGPNKTPVAAICLTSLVTMAFVFVGQVNVLAPIVTINFMLTYVAVDYSYFSLSMCSCSLTPVPEPVLXEGAEGLHCSEHLLLEKAPSYGSEGPAQRVLEGTLLEFTKDMDQLLQLTRKLESSQPRQGEGNRTPESQKRKSKKATKQTLQDSFLLDLKSPPSFPVEISDRLPAASWEGQESCWNKQTSKSEGTQPEGTYGEQLVPELCNQSESSGEDFFLKSRLQEQDVWRRSTSFYTHMCNPWVSLLGAVGSLLIMFVIQWVYTLVNMGVAAIVYFYIGRASPGLHLGSASNFSFFRWMRSLLLPSCRSLQSPQEQIILAPSLAKVDMEMTQLTQENADFATRDRYHHSSLVNREQLMPHY

SEQ ID NO: 1376 - protein, 137 aa, Homo sapiens
MLSGRLVLGLVSMAGRVCLCQGSAGSGAIGPVEAAIRTKLEEALSPEVLELRNESGGHAVPPGSETHFRVAVVSSRFEGLSPLQRHRLVHAALAEELGGPVHALAIQARTPAQWRENSQLDTSPPCLGGNKKTLGTP

SEQ ID NO: 1377 - protein, 143 aa, Homo sapiens
  SITE (19): Xaa equals any of the naturally occurring L-amino acids
  SITE (47): Xaa equals any of the naturally occurring L-amino acids
  SITE (58): Xaa equals any of the naturally occurring L-amino acids
  SITE (104): Xaa equals any of the naturally occurring L-amino acids
FGPAVFGFGSPRGKPPGNXRGGPIRVPGFGRPRPISAPEVWEGRPLXAPRSCFRNFRXRRSGGHAVPPGSETHFRVAVVSSRFEGLSPLQRHRLVHAALAEELXGPVHALAIQARTPAQWRENSQLDTSPPCLGGNKKTLGTP

SEQ ID NO: 1378 - protein, 137 aa, Homo sapiens; identical to SEQ ID NO: 1376

SEQ ID NO: 1379 - protein, 82 aa, Homo sapiens
  SITE (17): Xaa equals any of the naturally occurring L-amino acids
MIRRLVFAAFPRLFPVXLPSMLTHWASLAVIPTMTATSVGKAPPGPLPDASPSLRLPARRRPDPVGACRGVRGMADLMVPLP

SEQ ID NO: 1380 - protein, 254 aa, Homo sapiens
  SITE (176): Xaa equals any of the naturally occurring L-amino acids
  SITE (210): Xaa equals any of the naturally occurring L-amino acids
  SITE (214): Xaa equals any of the naturally occurring L-amino acids
  SITE (237): Xaa equals any of the naturally occurring L-amino acids
  SITE (246): Xaa equals any of the naturally occurring L-amino acids
EFGTSLKVRGFILEVSETTNPPEGTNSGHSGMVSALCGLCLLGSNDSPASASQVAGTTGLSKSLGLIEGYGGRGKGGLPATLSPAEEEKAKGPHEKYGYNSYLSEKISLDRSIPDYRPTKCKELKYSKDLPQISIIFIFVNEALSVILRSVHSAVNHTPTHLLKEIILVDDNSDEXELKVPLEEYVHKRYPGLVKVVRNQKRESLIRARXEGWXVATGQVTGFFDAPRGIHRLLGLXRVYPDPGKXRKRGNLPL

SEQ ID NO: 1381 - protein, 74 aa, Homo sapiens [sequence omitted]

SEQ ID NO: 1382 - protein, 273 aa, Homo sapiens
MVSALCGLCLLGSNDSPASASQVAGTTGLSKSLGLIEGYGGRGKGGLPATLSPAEEEKAKGPHEKYGYNSYLSEKISLDRSIPDYRPTKCKELKYSKDLPQISIIFIFVNEALSVILRSVHSAVNHTPTHLLKEIILVDDNSDEEELKVPLEEYVHKRYPGLVKVVRNQKREGLIRARIEGWKVATGQVTGFFDAHVEFTAGWAEPVLSRIQENRKRVILPSIDNIKQDNFEVQRYENSAHGYSWELWCMYISPPKDWWDAGDPSLPISDRFS

SEQ ID NO: 1383 - protein, 238 aa, Homo sapiens
MQQGPKEFIECVSHIRLLSWLLLGSLTHNAVCPNASSPCLPIPLDAGSHVADHLIVILIGFPEQSKTSVLHMCSLFHAFIFAQLWTVYCEQSAVATNLQNQNEFSFTAILTALEFWSRVTPSILQLMAHNKVMVEMVCLHVISLMEALQECNSTIFVKLIPMWLPMIQSNIKHLSAGLQLRLQAIQNHVNHHSLRTLPGSGQSSAGLAALRKWLQCTQFKMAQVEIQSSEAASQFYPL

SEQ ID NO: 1384 - protein, 227 aa, Homo sapiens
HELKVGLAQIAAMDISRGNHRDNKAVIRYLPWLYHPPSAMQQGPKEFIECVSHIRLLSWLLLGSLTHNAVCPNASSPCLPIPLDAGSHVADHLIVILIGFPEQSKTSVLHMCSLFHAFIFAQLWTVYCEQSAVATNLQNQNEFSFTAILTALEFWSRVTPSILQLMAHNKVMVEMVCLHVISLMEALQECNSTIFVKLIPMWLPMIQSNIKHLSAGLQFASRLFRTT

SEQ ID NO: 1385 - protein, 85 aa, Homo sapiens
MSTCCTSALQYLLALFPLPAPNCVSYRSQGSSCYLLLQIQKPRLREEPEWPQPQSKSMRGSMKLGFFPHCTRLLPSWGGGGRCSG

SEQ ID NO: 1386 - protein, 110 aa, Homo sapiens
  SITE (20): Xaa equals any of the naturally occurring L-amino acids
LLGCTKIGGRSDLAGPWVRXRSLEPTCVGMNPGSAGCPLVSGSTSLCFRVLIYKMGMMMMILWGCNMVQSHWKSLAVPQKVKHKSYHMIQVWQHIPVVPATQEDHLSPGV

SEQ ID NO: 1387 - protein, 85 aa, Homo sapiens; identical to SEQ ID NO: 1385

SEQ ID NO: 1388 - protein, 261 aa, Homo sapiens [sequence omitted]

SEQ ID NO: 1389 - protein, 72 aa, Homo sapiens
IVNPMFCNFHFRSLTYFFLSHKNTFVLIVGEIFSAFCMFFLIFVGLNILVVITVIIQQKAYPFKNFSTMSFF

SEQ ID NO: 1390 - protein, 261 aa, Homo sapiens [sequence omitted]

SEQ ID NO: 1391 - protein, 98 aa, Homo sapiens
MHLHVSVSLIWGLLSFLSLQVCVFVGSSQPLLLQCVSGPAPFLLSLGVRHQPFWDCPTGPSREETRLNPRALTRPRQTCWSFGWQVALRPSEKSPCFS

SEQ ID NO: 1392 - protein, 98 aa, Homo sapiens; identical to SEQ ID NO: 1391

SEQ ID NO: 1393 - protein, 139 aa, Homo sapiens
  SITE (14): Xaa equals any of the naturally occurring L-amino acids
  SITE (116): Xaa equals any of the naturally occurring L-amino acids
  SITE (139): Xaa equals any of the naturally occurring L-amino acids
MALYELFSHPVERXYRAGLCSKAALFLLLAAALTYIPPLLVAFRSHGFWLKRTATRSSRPCASNTRCCSWPCSDPKATGSSPGARSPPSTGCKGIACASRSFRGGDNACCVKQDSXSLCIYRSDVDSSQNSLVTKGAGX

SEQ ID NO: 1394 - protein, 316 aa, Homo sapiens
MALYELFSHPVERSYRAGLCSKAALFLLLAAALTYIPPLLVAFRSHGFWLKRSSYEEQPTVRFQHQVLLVALLGPESDGFLAWSTFPAFNRLQGDRLRVPLVSTREEDRNQDGKTDMLHFKLELPLQSTEHVLGVQLILTFSYRLHRMATLVMQSMAFLQSSFPVPGSQLYVNGDLRLQQKQPLSCGGLDARYNISVINGTSPFAYDYDLTHIVAAYQERNVTTVLNDPNPIWLVGRAADAPFVINAIIRYPVEVISYQPGFWEMVKFAWVQYVSILLIFLWVFERIKIFVFQNQVVTTIPVTVTPRGDLCKEHLS

SEQ ID NO: 1395 - protein, 103 aa, Homo sapiens
  SITE (77): Xaa equals any of the naturally occurring L-amino acids
MAFLLERSGTLLICSMWWHHGYSNITGTEGERRNLKRNKTNFRRFQDGRIGTAPVYSSQCERCRRWVISAFPTEQTXHQKIISHAWLGGSHAHGASLIASTAV

SEQ ID NO: 1396 - protein, 103 aa, Homo sapiens
MAFLLERSGTLLICSMWWHHGYSNITGTEGERRNLKRNKTNFRRFQDGRIGTAPVYSSQCERCRRWVISAFPTEQTAHQKIISHAWLGGSHAHGASLIASTAV

SEQ ID NO: 1397 - protein, 125 aa, Homo sapiens
MCVWFCLFACLFACLFFETESHSVAQAGVQWLDLSSLQQPPPPGFKCFSCLCLLSSWDYRRACHHTRIIFVFLVEMGFHHVDQADLELLTSSDPPALASRSAGITGVSHHTPPACLVFKFLFLGS

SEQ ID NO: 1398 - protein, 112 aa, Homo sapiens
  SITE (91): Xaa equals any of the naturally occurring L-amino acids
  SITE (106): Xaa equals any of the naturally occurring L-amino acids
APVLLLPSSCWQFWVLGFFFFRQSLTPSPGWKYSGAVSAHCSLRLPGSNDPLASASQLAGTTGAHHHGQLIFVFLVEMGFHHIAQAGLKLXTSSDLLTSAFQSAGXIYILNK

SEQ ID NO: 1399 - protein, 125 aa, Homo sapiens [sequence omitted]

SEQ ID NO: 1400 - protein, 79 aa, Homo sapiens [sequence omitted]

SEQ ID NO: 1401 - protein, 455 aa, Homo sapiens
  SITE (1): Xaa equals any of the naturally occurring L-amino acids
  SITE (17): Xaa equals any of the naturally occurring L-amino acids
  SITE (103): Xaa equals any of the naturally occurring L-amino acids
  SITE (178): Xaa equals any of the naturally occurring L-amino acids
XTGQRCENLLEERNCSXPGGPVNGYQKITGGPGLINGRHAKIGTVVSFFCNNSYVLSGNEKRTCQQNGEWSGKQPICIKACREPKISDLVRRRVLPMQVQSRXTPLHQLYSAAFSKQKLQSAPTKKPALPFGDLPMGYQHLHTQLQYECISPFYRRLGSSRRTCLRTGKWSGRAPSCXPICGKIENITAPKTQGLRWPWQAAIYRRTSGVHDGSLHKGAWFLVCSGALVNERTVVVAAHCVTDLGKVTMIKTADLKVVLGKFYRDDDRDEKTIQSLQISAIILHPNYDPILLDADIAILKLLDKARISTRVQPICLAASRDLSTSFQESHITVAGWNVLADVRSPGFKNDTLRSGVVSVVDSLLCEEQHEDHGIPVSVTDNMFCASWEPTAPSDICTAETGGIAAVSFPGRASPEPRWHLMGLVSWSYDKTCSHRLSTAFTKVLPFKDWIERNMK

SEQ ID NO: 1402 - protein, 323 aa, Homo sapiens
  SITE (283): Xaa equals any of the naturally occurring L-amino acids
  SITE (296): Xaa equals any of the naturally occurring L-amino acids
  SITE (298): Xaa equals any of the naturally occurring L-amino acids
MELGCWTQLGLTFLQLLLISSLPREYTVINEACPGAEWNIMCRECCEYDQIECVCPGKREVVGYTIPCCRNEENECDSCLIHPGCTIFENCKSCRNGSWGGTLDDFYVKGFYCAECRAGWYGGDCMRCGQVLRAPKGQILLESYPLNAHCEWTIHAKPGFVIQLRFVMLSLEFDYMCQYDYVEVRDGDNRDGQIIKRVCGNERPAPIQSIGSSLHVLFHSDGSKNFDGFHAIYEEITACSSSPCFHDGTCVLDKAGSYKCACLAGYTGQRCENLLEAGKSKIXASEDSLSVLEERXCXDPGGPVNGYQKITGGPGLINGRHAK

SEQ ID NO: 1403 - protein, 80 aa, Homo sapiens [sequence omitted]

SEQ ID NO: 1404 - protein, 121 aa, Homo sapiens
  SITE (114): Xaa equals any of the naturally occurring L-amino acids
KLRLREVKSIAQGHVARIWQSHDSDPGLLILIPVSFLAYHVASKDCSSLFTRKLFLPNLHLHLTPSFLKHYVCVFISIIFIVFGIHVLVCVWKKNLFYQLALGPTWKKKSLNVXAMYSLKM

SEQ ID NO: 1405 - protein, 80 aa, Homo sapiens [sequence omitted]

SEQ ID NO: 1406 - protein, 83 aa, Homo sapiens
  SITE (82): Xaa equals any of the naturally occurring L-amino acids
IWMHFISFLYPIALATTSSTVLNRSGECGHPCLVPVLRENAFSLSPFGMMFAVGLSYMAFFTLRYVPSVPILLRVFIIQECXF

SEQ ID NO: 1407 - protein, 94 aa, Homo sapiens
MHFISFLYPIALATTSSTVLNRSGECGHPCLVPVLRENAFSLSPFGMMFAVGLSYMAFFTLRYVPSVPILLRVFIIQECWILSNAFSASGEMII

SEQ ID NO: 1408 - protein, 94 aa, Homo sapiens; identical to SEQ ID NO: 1407

SEQ ID NO: 1409 - protein, 95 aa, Homo sapiens
MILIRKLFLRRCHWGGWLLPPARASCSGKHSLSHSCRGPRVQRPPHPRFWAGTLAPGPCPGLWCLPGLVQVDVLAAGRCDHLSCLPPLCPQAFLL

SEQ ID NO: 1410 - protein, 92 aa, Homo sapiens
MPGCVFCFLTLLFHSLSVGQYCCLICVCFVLYVYTQIHTRIHIHTHKHFFFPWRQGIALSPRLEYSSAIMTHRLIAALASQAQAILPPQPSE

SEQ ID NO: 1411 - protein, 225 aa, Homo sapiens
  SITE (66): Xaa equals any of the naturally occurring L-amino acids
  SITE (101): Xaa equals any of the naturally occurring L-amino acids
MIHVRHCTPIPALLVCCGATAVIMLVGDTYTLINYVSFINYLCYGVTILGLLLLRWRRPALHRPIXVNLLIPVAYLVFWAFLLVFSFISEPMVCGVGVIIXLTGVPIFFLGVFWRSKPKCVHRLTESMTHWGQELCFVVYPQDAPEEEENAPAHPPCCLPQTSPRSHNEIFVETEAVVSVYMLFIEEVFWQKSFVLFFSGKKRKKIRLSEACFKEALKCGLGFLS

SEQ ID NO: 1412 - protein, 172 aa, Homo sapiens
MIHVRHCTPIPALLVCCGATAVIMLVGDTYTLINYVSFINYLCYGVTILGLLLLRWRRPALHRPIKVNLLIPVAYLVFWAFLLVFSFISEPMVCGVGVIIILTGVPIFFLGVFWRSKPKCVHRLTESMTHWGQELCFVVYPQDAPEEEEEWPLPTLPAACHRQALEATMRFL

SEQ ID NO: 1413 - protein, 225 aa, Homo sapiens; identical to SEQ ID NO: 1411
  SITE (66): Xaa equals any of the naturally occurring L-amino acids
  SITE (101): Xaa equals any of the naturally occurring L-amino acids

SEQ ID NO: 1414 - protein, 67 aa, Homo sapiens
  SITE (12): Xaa equals any of the naturally occurring L-amino acids
KDKCILLKRQSXTHEEQCKLKPNQRLGVAAMPVIPALWEAEVGRLLEIRSLSLGNIVKPCLYKKYKN

SEQ ID NO: 1415 - protein, 587 aa, Homo sapiens; identical to SEQ ID NO: 346

SEQ ID NO: 1416 - protein, 157 aa, Homo sapiens
MRPRGLPPLLVVLLGCWASVSAQTDATPAVTTEGLNSTEAALATFGTFPSTRPPGTPRAPGPSSGPRPTPVTDVAVLCVCDLSPAQCDINCCCDPDCSSVDFSVFSACSVPVVTGDSQFCSQKAVIYSLNFTANPPQRVFELVDQINPSIFCIHITN

SEQ ID NO: 1417 - protein, 587 aa, Homo sapiens; identical to SEQ ID NO: 346

SEQ ID NO: 1418 - protein, 137 aa, Homo sapiens
  SITE (52): Xaa equals any of the naturally occurring L-amino acids
  SITE (117): Xaa equals any of the naturally occurring L-amino acids
  SITE (133): Xaa equals any of the naturally occurring L-amino acids
  SITE (137): Xaa equals any of the naturally occurring L-amino acids
MVEEPGRFLPLWLHILLITVLLVLSGIFSGLNLGLMALDPMELRIVQNCGTXKERRYARKIEPIRRKGNYLLCSLLLGNVLVNTSLTILLDNLIGSGLMAVASFTIGICHLWGDPTXGPCAPRHGAWLVGCQXPCFX

SEQ ID NO: 1419 - protein, 157 aa, Homo sapiens
  SITE (90): Xaa equals any of the naturally occurring L-amino acids
LKPFSQTPYFESPSFSPSWGWRQEDMWEATEAGSLCPLLCGWQGSPGLIHPLMEPQERRAPPKGMQLAAPLSHTCDPSVRGHPALAEVSXTVLRALPSCEFLPWRLFPGAESGPAAKLQASQGWGGCGTKVHVGPSTGCSRSWVPRAWQVKLCRPSA

SEQ ID NO: 1420 - protein, 631 aa, Homo sapiens [sequence omitted]

SEQ ID NO: 1421 - protein, 83 aa, Homo sapiens
MGVRVWELPAQPTGLHLLCFCTRTMLLALKLPKTKHSFPDPYTSILSFIHPAFTENLTLCQVSVFLSSSNTEMNQMFHGVSFR

SEQ ID NO: 1422 - protein, 103 aa, Homo sapiens
  SITE (86): Xaa equals any of the naturally occurring L-amino acids
  SITE (87): Xaa equals any of the naturally occurring L-amino acids
  SITE (93): Xaa equals any of the naturally occurring L-amino acids
  SITE (94): Xaa equals any of the naturally occurring L-amino acids
  SITE (96): Xaa equals any of the naturally occurring L-amino acids
MMASIQSFSAMALLFYTVFMFVIVLSSLKHGLFSGQWLRRVSYVRWEGVFRCIPIFGMSFACQSQVLPTYDSLDEPSVKTMSSIFXXSLNVVXXFXVMVGVFR

SEQ ID NO: 1423 - protein, 384 aa, Homo sapiens
  SITE (96): Xaa equals any of the naturally occurring L-amino acids
  SITE (131): Xaa equals any of the naturally occurring L-amino acids
QRQEDEEDKPRQVEVHQEPGAAVPRGQEAPEGKARETVENLPPLPLDPVLRAPGGRPAPSQDLNQRSLEHSEGPVGRDPAGPPDGGPDTEPRAAQXKLRDGQKDAAPRAAGTVKELPKGPEQVPVPDPARXAGGPEERLAEEFPGQSQDVTGGSQDRKKPGKEVAATGTSILKEANWLVAGPGAETGDPRMKPKQVSRDLGLAADLPGGAEGAAAQPQAVLRQPELRVISDGEQGGQQGHRLDHGGHLEMRKARGGDHVPVSHEQPRGGEDAAVQEPRQRPEPELGLKRAVPGGQRPDNAKPNRDLKLQAGSDLRRRRRDLGPHAEGQLAPRDGVIIGLNPLPDVQVNDLRGALDAQLRQAAGGALQVVHSRQLRQAPGPPEES

SEQ ID NO: 1424 - protein, 973 aa, Homo sapiens
MMASIQSFSAMALLFYTVFMFVIVLSSLKHGLFSGQWLRRVSYVRWEGVFRCIPIFGMSFACQSQVLPTYDSLDEPSVKTMSSIFASSLNVVTTFYVMVGFFGYVSFTEATAGNVLMHFPSNLVTEMLRVGFMMSVAVGFPMMILPCRQALSTLLCEQQQKDGTFAAGGYMPPLRFKALTLSVVFGTMVGGILIPNVETILGLTGATMGSLICFICPALIYKKIHKNALSSQVVLWVGLGVLVVSTVTTLSVSEEVPEDLAEEAPGGRLGEAEGLMKVEAARLSAQDPVVAVAEDGREKPKLPKEREELEQAQIKGPVDVPGREDGKEAPEEAQLDRPGQGIAVPVGEAHRHEPPVPHDKVVVDEGQDREVPEENKPPSRHAGGKAPGVQGQMAPPLPDSEREKQEPEQGEVGKRPGQAQALEEAGDLPEDPQKVPEADGQPAVQPAKEDLGPGDRGLHPRPQAVLSEQQNGLAVGGGEKAKGGPPPGNAAGDTGQPAEDSDHGGKPPLPAEKPAPGPGLPPEPREQRDVERAGGNQAASQLEEAGRAEMLDHAVLLQVIKEQQVQQKRLLDQQEKLLAVIEEQHKEIHQQRQEDEEDKPRQVEVHQEPGAAVPRGQEAPEGKARETVENLPPLPLDPVLRAPGGRPAPSQDLNQRSLEHSEGPVGRDPAGPPDGGPDTEPRAAQGKLRDGQKDAAPRAAGTVKELPKGPEQVPVPDPAREAGGPEERLAEEFPGQSQDVTGGSQDRKKPGKEVAATGTSILKEANWLVAGPGAETGDPRMKPKQVSRDLGLAADLPGGAEGAAAQPQAVLRQPELRVISDGEQGGQQGHRLDHGGHLEMRKARGGDHVPVSHEQPRGGEDAAVQEPRQRPEPELGLKRAVPGGQRPDNAKPNRDLKLQAGSDLRRRRRDLGPHAEGQLAPRDGVIGLNPLPDVQVNDLRGALDAQLRQAAGGALQVVHSRQLRQAPGPPEES

SEQ ID NO: 1425 - protein, 110 aa, Homo sapiens
  SITE (89): Xaa equals any of the naturally occurring L-amino acids
  SITE (96): Xaa equals any of the naturally occurring L-amino acids
  SITE (104): Xaa equals any of the naturally occurring L-amino acids
MYLQIPVKHMLHSGYQATFFSPKIGCSSILVFVCLLVFLRQSLALLPRLEYSGAILAHCNLHLLGSSDSPASASPVAGITGMHHHTQLXFCTFSRXGIYQLASXSPNPDL

SEQ ID NO: 1426 - protein, 57 aa, Homo sapiens
FNTPKIFFGTYHRQGTLISTGDTISCLGLLCSSAAREGIAICRILKKHKHKGAKLYI

SEQ ID NO: 1427 - protein, 127 aa, Homo sapiens
MLHSGYQATFFSPKIGCSSILVFVCLLVFLRQSLALLPRLEYSGAILAHCNLHLLGSSDSPASASPVAGITGMHHHTQLFFCTFSRDGILPCWPGWSPTPDLRQSTLLSLPKCWDYRHEPLRPAQAF

SEQ ID NO: 1428 - protein, 80 aa, Homo sapiens [sequence omitted]

SEQ ID NO: 1429 - protein, 73 aa, Homo sapiens
  SITE (38): Xaa equals any of the naturally occurring L-amino acids
HFSFWFIHFPHFHLKILTKCLAEFSKYNNFTLPADNEXIRVQNPFQLSKHLLSLYFVSDTGVKFWKCKRNLHL

SEQ ID NO: 1430 - protein, 80 aa, Homo sapiens [sequence omitted]

SEQ ID NO: 1431 - protein, 26 aa, Homo sapiens
MLRWHLWSWFCWFCLSEAGVLLDLPT

SEQ ID NO: 1432 - protein, 84 aa, Homo sapiens
  SITE (1): Xaa equals any of the naturally occurring L-amino acids
  SITE (25): Xaa equals any of the naturally occurring L-amino acids
  SITE (42): Xaa equals any of the naturally occurring L-amino acids
  SITE (64): Xaa equals any of the naturally occurring L-amino acids
  SITE (79): Xaa equals any of the naturally occurring L-amino acids
XMSRQHRLNPHGPDPAAPHRACRLXSPRQVTWLTPAEALPLXPCPSQCGAHCRQHGPEREGSAXPAALLRPGLPVFGHXLRLSQ

SEQ ID NO: 1433 - protein, 26 aa, Homo sapiens
MLRWHLWSWFCWFCLSEAGVLLDLPT

SEQ ID NO: 1434 - protein, 139 aa, Homo sapiens
MALRMLWAGQAKGILGGWGIICLVMSLLLQHPGVYSKCYFQAQAPCHYEGKYFTLGESWLRKDCFHCTCLHPVGVGCCDTSQHPIDFPAGCEVRQEAGTCQFSLVQKSDPRLPCKGGGPDPEWGSANTPVPGAPAPHSS

SEQ ID NO: 1435 - protein, 139 aa, Homo sapiens; identical to SEQ ID NO: 1434

SEQ ID NO: 1436 - protein, 80 aa, Homo sapiens
MFDRCRVTSCSCTCGAGAKWCTHVVALCLFRIHNASAVCLRAPVSESLSRLQRDQLQKFAQYLISELPQQVGEVGTPSCN

SEQ ID NO: 1437 - protein, 145 aa, Homo sapiens
DPSGSFMGRSVMMRILGSPVFFPMHDTSVCLTYPNFYTVVSPTGSRPPSRNWNSETPGDEELGFEAAVAALGMKTTVSEAEHPLLCEGTRREKGDLALALMITYKDDQAKLKKKISRAWWRAPVVPATREAEVGELLEPRSLRLQ

SEQ ID NO: 1438 - protein, 80 aa, Homo sapiens; identical to SEQ ID NO: 1436

SEQ ID NO: 1439 - protein, 91 aa, Homo sapiens
  SITE (56): Xaa equals any of the naturally occurring L-amino acids
MASQVPSSPFQSFFVFVFVFLRPSHSVAQAGVPLHFYFFIQQVLIKCALYQVLSSXLGYNGDQGDCRFWQGKLTSNTATRHSETLSLLEEL

SEQ ID NO: 1440 - protein, 137 aa, Homo sapiens
  SITE (132): Xaa equals any of the naturally occurring L-amino acids
MSAKQVTSQSSLSENDGFQAFVWWLLGIGALTFALLMSARMGIFQETLYKRFGKHSKEALFYNHALPLPGFVFLASDIYDHAVLFNKSELYEIPVIGVTLPIMWFYLLMNIITQYVCIRGVFILTTGMRLPXRHARS

SEQ ID NO: 1441 - protein, 94 aa, Homo sapiens
  SITE (6): Xaa equals any of the naturally occurring L-amino acids
PYPFCXPSPFPSSAAPHSQSDAAGTTITRSGQVNRDTSNSRAGLPPAFWEGKRCSPELIPSDSAARLVGLLFPTFCFFFFLCKSQMLLSIAFCD

SEQ ID NO: 1442 - protein, 104 aa, Homo sapiens
  SITE (104): Xaa equals any of the naturally occurring L-amino acids
MGFSGPALLFPIFLLHSASSMLSHTSTIVQTNKQTEERKDGEFCNRAAKSQSKQEEVEGTKTNKQRCLDYSTVDMPSILACAPLSITGHNSEEVQIKWCLFVCX

SEQ ID NO: 1443 - protein, 104 aa, Homo sapiens; identical to SEQ ID NO: 1442
  SITE (104): Xaa equals any of the naturally occurring L-amino acids

SEQ ID NO: 1444 - protein, 88 aa, Homo sapiens [sequence omitted]

SEQ ID NO: 1445 - protein, 64 aa, Homo sapiens [sequence omitted]

SEQ ID NO: 1446 - protein, 88 aa, Homo sapiens [sequence omitted]

SEQ ID NO: 1447 - protein, 82 aa, Homo sapiens
  SITE (61): Xaa equals any of the naturally occurring L-amino acids
MASHSFLLDIYLVLSLWKCIPGLVQDVFLEMKVLTESALCKVMTLEPLQHSVLVFRCWQSXFQAKSSRPCQASIFAYYTLNF

SEQ ID NO: 1448 - protein, 82 aa, Homo sapiens
MASHSFLLDIYLVLSLWKCIPGLVQDVFLEMKVLTESALCKVMTLEPLQHSVLVFRCWQSPFQAKSSRPCQASIFAYYTLNF

SEQ ID NO: 1449 - protein, 103 aa, Homo sapiens
MQSFHHPLRILLWLPLVTKKSLCPVHKTMTQLSLVLASLSNSLSFGYPGFVRANRQTSLIGEFLGGGGWHAFAYCFLSAENASLSLAVSATPPDLVSLICLSQ

SEQ ID NO: 1450 - protein, 50 aa, Homo sapiens
  SITE (33): Xaa equals any of the naturally occurring L-amino acids
AAMRWRWWQRLLPWRLLQARGFPQNSAPSLGLXARTYSQGDCSYSRTALL

SEQ ID NO: 1451 - protein, 130 aa, Homo sapiens
  SITE (31): Xaa equals any of the naturally occurring L-amino acids
  SITE (115): Xaa equals any of the naturally occurring L-amino acids
  SITE (116): Xaa equals any of the naturally occurring L-amino acids
  SITE (122): Xaa equals any of the naturally occurring L-amino acids
  SITE (126): Xaa equals any of the naturally occurring L-amino acids
  SITE (127): Xaa equals any of the naturally occurring L-amino acids
MRWRWWQRLLPWRLLQARGFPQNSAPSLGLXARTYSQGDCSYSRTALYDLLGVPSTATQAQIKAAYYRQCFLYHPDRNSGSAEAAERFTRISQAYVVLGSAPSVASMIAAYSATXXCADLAXGLQXXRHP

SEQ ID NO: 1452 - protein, 30 aa, Homo sapiens
LNPWPLIVYLCWDPKELYSPCPPRPAQLSR

SEQ ID NO: 1453 - protein, 226 aa, Homo sapiens
MAAMRWRWWQRLLPWRLLQARGFPQNSAPSLGLGARTYSQGDCSYSRTALYDLLGVPSTATQAQIKAAYYRQCFLYHPDRNSGSAEAAERFTRISQAYVVLGSATLRRKYDRGLLSDEDLRGPGVRPSRTPAPDPGSPRTPPPTSRTHDGSRASPGANRTMFNFDAFYQAHYGEQLERERRLRARREALRKRQEYRSMKGLRWEDTRDTAAIFLIFSIFIIIGFYI

SEQ ID NO: 1454 - protein, 302 aa, Homo sapiens
MLVTNRPGVLKEPKLMGAISFFIFFFTLLVLARQNEYYCRLDFLWKKKLRQEREETETMENLTRLLLENVLPAHVAPQFIGQNRRNEDLYHQSYECVCVLFASVPDFKEFYSESNINHEGLECLRLLNEIIADFDELLSKPKFSGVEKIKTIGSTYMAATGLNATSGQDAQQDAERSCSHLGTMVEFAVALGSKLDVINKHSFNNFRLRVGLNHGPVVAGVIGAQKPQYDIWGNTVNVASRMESTGVLGKIQVTEETAWALQSLGYTCYSRGVIKVKGKGQLCTYFLNTDLTRTGPPSATLG

SEQ ID NO: 1455 - protein, 76 aa, Homo sapiens
  SITE (11): Xaa equals any of the naturally occurring L-amino acids
MGPFFPYSLLXFFPCSFSSPSFIFLLLILKTGCSLFPCCPISPLCPYFSQSLSPLKSRAGRCYWCFFTLGPSSYLL

SEQ ID NO: 1456 - protein, 61 aa, Homo sapiens
TLTQHQGAHLGPFLDMSFLHYHSHEPPTSGIADQGWGENVACCFLVLVIIYLNKQCCKYLP

SEQ ID NO: 1457 - protein, 110 aa, Homo sapiens
  SITE (8): Xaa equals any of the naturally occurring L-amino acids
MRLSCPRXPGWMGPFFPYSLLSFFPCSFSSPSFIFLLLILKTGCSLFPCCPISPLCPYFSQSLSPLKSRAGRCYWCFFTLGPSSIFVFSVYPLPDTSFSPSLGPKAENQC

SEQ ID NO: 1458 - protein, 99 aa, Homo sapiens
MGPFFPYSLLSFFPCSFSSPSFIFLLLILKTGCSLFPCCPISPLCPYFSQSLSPLKSRAGRCYWCFFTLGPSSIFVFSVYPLPDTSFSPSLGPKAENQC

SEQ ID NO: 1459 - protein, 98 aa, Homo sapiens
MFICFLTLLTPGFSLSLRRKHYLITFRWFTYSVKNMCKYFVQSPVSNKQPYVVTNHLFCHSVLGHRSVGMVSDLDAPTFHVRPRTVPWSVDSWSALTG

SEQ ID NO: 1460 - protein, 98 aa, Homo sapiens; identical to SEQ ID NO: 1459

SEQ ID NO: 1461 - protein, 33 aa, Homo sapiens
MLVLVSGIIFSLADRSSSSTIRMDALAFLQGLL

SEQ ID NO: 1462 - protein, 89 aa, Homo sapiens
MLVLVSGIIFSLADRSSSSTIRMDALAFLQGLLGTEPAEAFHPHLPILLPPVMACVADPFYKIAARGPGGAAGAGAGPVAAAQASDAGS

SEQ ID NO: 1463 - protein, 125 aa, Homo sapiens
MYFIFTSFWAYKIYYVYGFMMLVLVILCIVTVCVTIVCTYFLLNAEDYRWQWTSFLSAASTAIYVYMYSFYYYFFKTKMYGLFQTSFYFGYMAVFSTALGIMCGAIGYMGTSAFVRKIYTNVKID

SEQ ID NO: 1464 - protein, 125 aa, Homo sapiens; identical to SEQ ID NO: 1463

SEQ ID NO: 1465 - protein, 250 aa, Homo sapiens
MRGTPKTHLLAFSLLCLLSKVRTQLCPTPCTCPWPPPRCPLGVPLVLDGCGCCRVCARRLGEPCDQLHVCDASQGLVCQPGAGPGGRGALCLLAEDDSSCEVNGRLYREGETFQPHCSIRCRCEDGGFTCVPLCSEDVRLPSWDCPHPRRVEVLGKCCPEWVCGQGGGLGTQPLPAQGPQFSGLVSSLPPGVPCPEWSTAWGPCSTTCGLGMATRVSNQNRFCRLETQRRLCLSRPCPPSRGRSPQNSAF

SEQ ID NO: 1466 - protein, 250 aa, Homo sapiens; identical to SEQ ID NO: 1465

SEQ ID NO: 1467 - protein, 388 aa, Homo sapiens
  SITE (277): Xaa equals any of the naturally occurring L-amino acids
MMTITFLPYTFSLMVTFPDVPLGIFLFCVCVIAIGVVQALIVGYAFHFPHLLSPQIQRSAHRALYRRHVLGIVLQGPALCFAAAIFSLFFVPLSYLLMVTVILLPYVSKVTGWCRDRLLGHREPSAHPVEVFSFDLHEPLSKERVEAFSDGVYAIVATLLILDICEDNVPDPKDVKERFSGSLVAALSATGPRFLAYFGSFATVGLLWFAHHSLFLHVRKATRAMGLLNTLSLAFVGGLPLAYQQTSAFARQPRDELERVRVSCTIIFLASIFQLAXWTTALLHQAETLQPSVWFGGREHVLMFAKLALYPCASLLAFASTCLLSRFSVGIFHLMQIAVPCAFLLLRLLVGLALATLRVLRGLARPEHPPPAPTGQDDPQSQLLPAPC

SEQ ID NO: 1468 - protein, 388 aa, Homo sapiens
MMTITFLPYTFSLMVTFPDVPLGIFLFCVCVIAIGVVQALIVGYAFHFPHLLSPQIQRSAHRALYRRHVLGIVLQGPALCFAAAIFSLFFVPLSYLLMVTVILLPYVSKVTGWCRDRLLGHREPSAHPVEVFSFDLHEPLSKERVEAFSDGVYAIVATLLILDICEDNVPDPKDVKERFSGSLVAALSATGPRFLAYFGSFATVGLLWFAHHSLFLHVRKATRAMGLLNTLSLAFVGGLPLAYQQTSAFARQPRDELERVRVSCTIIFLASIFQLAMWTTALLHQAETLQPSVWFGGREHVLMFAKLALYPCASLLAFASTCLLSRFSVGIFHLMQIAVPCAFLLLRLLVGLALATLRVLRGLARPEHPPPAPTGQDDPQSQLLPAPC

SEQ ID NO: 1469 - protein, 262 aa, Homo sapiens
  SITE (231): Xaa equals any of the naturally occurring L-amino acids
MSPPPLLQPLLLLLPLLNVEPSGATLIRIPLHRVQPGRRILNLLRGWREPAELPKLGAPSPGDKPIFVPLSNYRDVQYFGEIGLGTPPQNFTVAFDTGSSNLWVPSRRCHFFSVPCWLHHRFDPKASSSFQANGTKFAIQYGTGRVDGILSEDKLTIGGIKGASVIFGEALWEPSLVFAFAHFDGILGLGFPILSVEGVRPPMDVLVEQGLLDKPVFSFYLNRDPEEPDGXELVLGGSDPAHYIPPSPFVPVRSPPMADPQG

SEQ ID NO: 1470 - protein, 145 aa, Homo sapiens
MSPPPLLQPLLLLLPLLNVEPSGATLIRIPLHRVQPGRRILNLLRGWREPAELPKLGAPSPGDKPIFVPLSNYRDVQYFGEIGLGTPPQNFTVAFDTGSSNLWVPSRRCHFFSVPCWLHHRFDPKASSSFRPMGPSLPFNMELGG

SEQ ID NO: 1471 - protein, 212 aa, Homo sapiens
  SITE (9): Xaa equals any of the naturally occurring L-amino acids
GSAGTARIXGSTTRPDPEEPDGGELVLGGSDPAHYIPPLTFVPVTVPAYWQIHMERVKVGPGLTLCAKGCAAILDTGTSLITGPTEEIRALHAAIGGIPLLAGEYIILCSEIPKLPAVSFLLGGVWFNLTAHDYVIQTTRNGVRLCLSGFQALDVPPPAGPFWILGDVFLGTYVAVFDRGDMKSSARVGLARARTRGADLGWGETAQAQFPG

SEQ ID NO: 1472 - protein, 150 aa, Homo sapiens [sequence omitted]

SEQ ID NO: 1473 - protein, 150 aa, Homo sapiens [sequence omitted]

SEQ ID NO: 1474 - protein, 353 aa, Homo sapiens [sequence omitted]

SEQ ID NO: 1475 - protein, 353 aa, Homo sapiens [sequence omitted]

SEQ ID NO: 1476 - protein, 80 aa, Homo sapiens
  SITE (11): Xaa equals any of the naturally occurring L-amino acids
MTHCLLHGMGXAGAASLTPKPMSLISAYCGGLWLAAVAVMVQMAALCGAQDIQDKFSSILSRGQEAYERLLWNGEFGEPK

SEQ ID NO: 1477 - protein, 415 aa, Homo sapiens
VGLVSMLGIPIPGAEGAPVLNSLVFLSGQSTPTQKGVGIAGAVCVSSKLRPRGQCRLEFSLAWDMPRIMFGAKGQVHYRRYTRFFGQDGDAAPALSHYALCRYAEWEERISAWQSPVLDDRSLPAWYKSALFNELYFLADGGTVWLEVLEDSLPEELGRNMCHLRPTLRDYGRFGYLEGQEYRMYNTYDVHFYASFALIMLWPKLELSLQYDMALATLREDLTRRRYLMSGVMAPVKRRNVIPHDIGDPDDEPWLRVNAYLIHDTADWKDLNLKFVLQVYRDYYLTGDQNFLKDMWPVCLAVMESEMKFDKDHDGLIENGGYADQTYDGWVTTGPSAYCGGLWLAAVAVMVQMAALCGAQDIQDKFSSILSRGQEAYERLLWNGRYYNYDSSSRPQSRSVMSDQCAGQWFLKACG

SEQ ID NO: 1478 - protein, 86 aa, Homo sapiens
  SITE (75): Xaa equals any of the naturally occurring L-amino acids
MSLGGSQSSLVSWRATQIACMTLSWPLWTCWLAAPLSLTKSPWRQWSTHVKGFNLASSQAEVQPVGQTLASEKKXLQEVLARAIQH

SEQ ID NO: 1479 - protein, 159 aa, Homo sapiens
  SITE (153): Xaa equals any of the naturally occurring L-amino acids
  SITE (158): Xaa equals any of the naturally occurring L-amino acids
MHRLIFVYTLICANFCSCRDTSATPQSASIKALRNANLRRDESNHLTDLYRRDETIQVKGNGYVQSPRFPNSYPRNLLLTWRLHSQENTRIQLVVDNQFGLEEAENDICRYDFVEVEDISETSTIIRGRWCGHKEVPPRIKSRTNHIKITFKXDDYFXA

SEQ ID NO: 1480 - protein, 89 aa, Homo sapiens
  SITE (33): Xaa equals any of the naturally occurring L-amino acids
  SITE (63): Xaa equals any of the naturally occurring L-amino acids
LIIKKGKIWFPEKRPIPKHFFHEKHCILTYVDXNNLSPKPCHNNISALEIKSLCFLCILLRHXYSFNTYLKNLLRRFFIIVLQKTMYKL

SEQ ID NO: 1481 - protein, 370 aa, Homo sapiens
  SITE (216): Xaa equals any of the naturally occurring L-amino acids
MHRLIFVYTLICANFCSCRDTSATPQSASIKALRNANLRRDESNHLTDLYRRDETIQVKGNGYVQSPRFPNSYPRNLLLTWRLHSQENTRIQLVFDNQFGLEEAENDICRYDFVEVEDISETSTIIRGRWCGHKEVPPRIKSRTNQIKITFKSDDYFVAKPGFKIYYSLLEDFQPAAASETNWESVTSSISGVSYNSPSVTDPTLIADALDKKIAXFDTVEDLLKYFNPESWQEDLENMYLDTPRYRGRSYHDRKSKVDLDRLNDDAKRYSCTPRNYSVNIREELKLANVVFFPRCLLVQRCGGNCGCGTVNWRSCTCNSGKTVKKYHEVLQFEPGHIKRRGRAKTMALVDIQLDHHERCDCICSSRPPR

SEQ ID NO: 1482 - protein, 370 aa, Homo sapiens
MHRLIFVYTLICANFCSCRDTSATPQSASIKALRNANLRRDESNHLTDLYRRDETIQVKGNGYVQSPRFPNSYPRNLLLTWRLHSQENTRIQLVFDNQFGLEEAENDICRYDFVEVEDISETSTIIRGRWCGHKEVPPRIKSRTNQIKITFKSDDYFVAKPGFKIYYSLLEDFQPAAASETNWESVTSSISGVSYNSPSVTDPTLIADALDKKIAEFDTVEDLLKYFNPESWQEDLENMYLDTPRYRGRSYHDRKSKVDLDRLNDDAKRYSCTPRNYSVNIREELKLANVVFFPRCLLVQRCGGNCGCGTVNWRSCTCNSGKTVKKYHEVLQFEPGHIKRRGRAKTMALVDIQLDHHERCDCICSSRPPR

SEQ ID NO: 1483 - protein, 229 aa, Homo sapiens
  SITE (206): Xaa equals any of the naturally occurring L-amino acids
MYKLLLFDLLTVLAVALLIQFPRKLLCGLCPGALGRLAGTQEFQVPDEVLGLIYAQTVVWVGSFFCPLLPLLNTVKFLLLFYLKKLTLFSTCSPAARTFRASAANFFFPLVLLLGLAISSVPLLYSIFLIPPSKLCGPFRGQSSIWAQIPESISSLPETTQNFLFFLGTQAFAVPLLLISSILMAYTVALANSYGRLISELKRQRXTEAQNKVFLARRAVALTSTKPAL

SEQ ID NO: 1484 - protein, 85 aa, Homo sapiens
  SITE (33): Xaa equals any of the naturally occurring L-amino acids
  SITE (62): Xaa equals any of the naturally occurring L-amino acids
FLGTQAFAVPLLLISRSQTFGYNGRACQEWLPXLISSILMAYTVALANSYGRLISELKRQRXTEAQNKVFLARRAVALTSTKPAL

SEQ ID NO: 1485 - protein, 229 aa, Homo sapiens; identical to SEQ ID NO: 1483
  SITE (206): Xaa equals any of the naturally occurring L-amino acids

SEQ ID NO: 1486 - protein, 93 aa, Homo sapiens
MATFSLCYLMAFPLCAGIAGISVCVKISCFYKDISQTGLRPTLKAYLNFNLLFSGPISKYSLILRYWYLGLQHTNFGVDTIQPITNCAHEMIY

SEQ ID NO: 1487 - protein, 124 aa, Homo sapiens
  SITE (19): Xaa equals any of the naturally occurring L-amino acids
  SITE (25): Xaa equals any of the naturally occurring L-amino acids
  SITE (28): Xaa equals any of the naturally occurring L-amino acids
  SITE (56): Xaa equals any of the naturally occurring L-amino acids
  SITE (70): Xaa equals any of the naturally occurring L-amino acids
ALPFTLNKTSNYPQDLVLXSLLLGXNYXQLQILLECIFPVPHSLLYVVLPNSIDLXQKLPRDLPHLPCPXFLWPRPGSPPKCFLSLSLTALPLSSCRYTLPPSPHPLMPSPLLPSWVQPSCYLA

SEQ ID NO: 1488 - protein, 59 aa, Homo sapiens
MATFSLCYLMAFPLCAGIAGISVCVKISCFYKDISQTGLRPTLKAYLNFNLLFSGPIQI

SEQ ID NO: 1489 - protein, 314 aa, Homo sapiens
GSGRQAGWPRGLLSGPAPSERSAVARLAPTESLARMEAVVNLYQEVMKHADPRIQGYPLMGSPLLMTSILLTYVYFVLSLGPRIMANRKPFQLRGFMIVYNFSLVALSLYIVYEFLMSGWLSTYTWRCDPVDYSNSPEALRMVRVAWLFLFSKFIELMDTVIFILRKKDGQVTFLHVFHHSVLPWSWWWGVKIAPGGMGSFHAMINSSVHVIMYLYYGLSAFGPVAQPYLWWKKHMTAIQLIQFVLVSLHISQYYFMSSCNYQYPVIIHLIWMYGTIFFMLFSNFWYHSYTKGKRLPRALQQNGAPGIAKVKAN

SEQ ID NO: 1490 - protein, 258 aa, Homo sapiens [sequence omitted]

SEQ ID NO: 1491 - protein, 222 aa, Homo sapiens
MKHADPRIQGYPLMGSPLLMTSILLTYVYFVLSLGPRIMANRKPFQLRGFMIVYNFSLVALSLYIVYEVIFILRKKDGQVTFLHVFHHSVLPWSWWWGVKIAPGGMGSFHAMINSSVHVIMYLYYGLSAFGPVAQPYLWWKKHMTAIQLIQFVLVSLHISQYYFMSSCNYQYPVIIHLIWMYGTIFFMLFSNFWYHSYTKGKRLPRALQQNGAPGIAKVKAN

SEQ ID NO: 1492 - protein, 93 aa, Homo sapiens [sequence omitted]

SEQ ID NO: 1493 - protein, 65 aa, Homo sapiens
KLSNCNCFQLLSEVGIMVDLISSVLFLQLYYQVLNFGMIVSSALMIWKGLMVITGSESPIVVVLR

SEQ ID NO: 1494 - protein, 93 aa, Homo sapiens [sequence omitted]

SEQ ID NO: 1495 - protein, 81 aa, Homo sapiens
MGKPSLLFFGLMASWRTRSQARRTWSTSSRMPGRNVLLRSRKRRSQISSSISWSIALGPVMPWPGLILFLKISRSSTPTRL

SEQ ID NO: 1496 - protein, 81 aa, Homo sapiens; identical to SEQ ID NO: 1495

SEQ ID NO: 1497 - protein, 47 aa, Homo sapiens
  SITE (47): Xaa equals any of the naturally occurring L-amino acids
MRLRFWLLIWLLLGFISHQPTPVINSLAVYRHRETDFGVRVRDHPWX

SEQ ID NO: 1498 - protein, 394 aa, Homo sapiens
  SITE (73): Xaa equals any of the naturally occurring L-amino acids
  SITE (194): Xaa equals any of the naturally occurring L-amino acids
  SITE (200): Xaa equals any of the naturally occurring L-amino acids
  SITE (210): Xaa equals any of the naturally occurring L-amino acids
  SITE (225): Xaa equals any of the naturally occurring L-amino acids
  SITE (237): Xaa equals any of the naturally occurring L-amino acids
  SITE (389): Xaa equals any of the naturally occurring L-amino acids
EVINTLADHRHRGTDFGGSPWLLIITVFLRSYKFAISLCTSYLCVSFLKTIFPSQNGHDGSTDVQQRARRSNXRRQEGIKIVLEDIFTLWRQVETKVRAKIRKMKVTTKVNRHDKINGKRKTAKEHLRKLSMKEREHGEKERQVSEAEENGKLDMKEIHTYMEMFQRAQALRRRAEDYYRCKITPSARKPLCNXVRMAAXEHRHSSGLPXWPYLTAETLKNRMGXQPPPPTQQHSIXDNSLSLKTPPECLLHPLPPSVDDNIKECPLAPLPPSVDDNLKECLLVPLPPSPLPPSVDDNLKDCLFVPLPPSPLPPSVDDNLKTPPLATQEAEAEKPPKPKRWRVDEVEQSPKPKRRRADEVEQSPKPKRQREAEAQQLPKPKRRRLSKLXTRHCT

SEQ ID NO: 1499 - protein, 212 aa, Homo sapiens
  SITE (54): Xaa equals any of the naturally occurring L-amino acids
  SITE (74): Xaa equals any of the naturally occurring L-amino acids
  SITE (81): Xaa equals any of the naturally occurring L-amino acids
  SITE (101): Xaa equals any of the naturally occurring L-amino acids
  SITE (122): Xaa equals any of the naturally occurring L-amino acids
MRLRFWLLIWLLLGFISHQPTPVINSLAVYRHRETDFGVGVRDHPGQHGKTPSXQKLDNLIIIIIGFLRRYTFXILFCTSXLCVSFLKTIFWSRNGHDGSXDVQQRAWRSNRSRQKGLRSIXMHTKKRVSSFRGNKIGLKDVITLRRHVETKVRAKIRKRKVTTKINRHNKINGKRKTARKQKMFQRAQELRRRAEDYHKCKVRSFLPAVAG

SEQ ID NO: 1500 - protein, 121 aa, Homo sapiens
  SITE (110): Xaa equals any of the naturally occurring L-amino acids
  SITE (112): Xaa equals any of the naturally occurring L-amino acids
  SITE (114): Xaa equals any of the naturally occurring L-amino acids
  SITE (116): Xaa equals any of the naturally occurring L-amino acids
MATLVWRLYLLQPELVLPSPPPPPRFPGPVQTPKIPGPARGPRTGFQPPAFSFPSPTPFFSAGTPVLSWKFAVLCPIAQELLPAEKGARNKCSGLSRSYIFAMLPEMGGXNXLXQXNEWHG

SEQ ID NO: 1501 - protein, 128 aa, Homo sapiens
MDRLKSHLTVCFLPSVPFLILVSTLATAKSVTNSTLNGTNVVLGSVPVIIARTDHIIVKEGNSALINCSVYGIPDPQFKWYNSIGKLLKEEEDEKERGGGKWQMHDSGLLNITKVSFSDRGKYTVCGF

SEQ ID NO: 1502 - protein, 120 aa, Homo sapiens
  SITE (5): Xaa equals any of the naturally occurring L-amino acids
  SITE (7): Xaa equals any of the naturally occurring L-amino acids
  SITE (8): Xaa equals any of the naturally occurring L-amino acids
  SITE (14): Xaa equals any of the naturally occurring L-amino acids
  SITE (40): Xaa equals any of the naturally occurring L-amino acids
LEFKXPXXQVPPWXWLSLFKKYRSATIANARTWVFCSFFXVLILLFLYNGVIVINTNCSFWFSPHCHFCPYVSLEHVPQRLWYQSPVPGLISTSHITFVMFQSSYEACYFFFIPQAYFHR

SEQ ID NO: 1503 - protein, 409 aa, Homo sapiens
MDRLKSHLTVCFLPSVPFLILVSTLATAKSVTNSTLNGTNVVLGSVPVIIARTDHIIVKEGNSALINCSVYGIPDPQFKWYNSIGKLLKEEEDEKERGGGKWQMHDSGLLNITKVSFSDRGKYTCVASNIYGTVNNTVTLRVIFTSGDMGVYYMVVCLVAFTIVMVLNITRLCMMSSHLKKTEKAINEFFRTEGAEKLQKAFEIAKRIPIITSAKTLELAKVTQFKTMEFARYIEELARSVPLPPLIMNCRTIMEEIMEVVGLEEQGQNFVRHTPEGQEAADRDEVYTIPNSLKRSDSPAADSDASSLHEQPQQIAIKVSVHPQSKKEHADDQEGGQFEVKDVEETELSAEHSPETAEPSTDVTSTELTSEEPTPVEVPDKVLPPAYLEATEPAVTHDKNTCIIYESHV

SEQ ID NO: 1504 - protein, 107 aa, Homo sapiens
  SITE (63): Xaa equals any of the naturally occurring L-amino acids
  SITE (64): Xaa equals any of the naturally occurring L-amino acids
  SITE (82): Xaa equals any of the naturally occurring L-amino acids
SMKAKRNKGRWVAAGPTAATAWIVLTVQAACPEGKCPLPGVCAPITWAPSYLTAGKAKLAGPXXYKPGPVLKAAHLPMGQHXHTTPWWQPLFIISVSRYPPRTPKQH

SEQ ID NO: 1505 - protein, 106 aa, Homo sapiens
MKAKRNKGRWVAAGPTAATAWIVLTVQAACPEGKCPLPGVCAPITWAPSYLTAGKAKLAGPRTYKPGPVLKAAHLPMGQHPHTTPWWQPLFIISVSRYPPRTPKQH

SEQ ID NO: 1506 - protein, 106 aa, Homo sapiens; identical to SEQ ID NO: 1505

SEQ ID NO: 1507 - protein, 109 aa, Homo sapiens
MVSCWDQNLILFLTCLLAVLIFCLVLAVYIVFFKFLKASLIYVPREWVTLTKANDVQKGHDLGLSYCRTQSTAWPPPCLGHHLHLESSLTLESFGLLTIPISDSVSLIT

SEQ ID NO: 1508 - protein, 71 aa, Homo sapiens
  SITE (32): Xaa equals any of the naturally occurring L-amino acids
GVRIDASGSLAAVLPLNHYTITEFNFLQFQGXTELSSDSKIRISNREWIHLRIGETDIHDLKQKSETKLIN

SEQ ID NO: 1509 - protein, 109 aa, Homo sapiens; identical to SEQ ID NO: 1507

SEQ ID NO: 1510 - protein, 82 aa, Homo sapiens
MGLQSRLSQPCHCRHLGLGNSVVGTVLFLVGCLVASLPPPTRCQGHCSPQPPAPVVTIVSKHCQMVQGKGKIAPVEKSTAVK

SEQ ID NO: 1511 - protein, 82 aa, Homo sapiens; identical to SEQ ID NO: 1510

SEQ ID NO: 1512 - protein, 115 aa, Homo sapiens [sequence omitted]

SEQ ID NO: 1513 - protein, 115 aa, Homo sapiens [sequence omitted]

SEQ ID NO: 1514 - protein, 56 aa, Homo sapiens; identical to SEQ ID NO: 987

SEQ ID NO: 1515 - protein, 56 aa, Homo sapiens; identical to SEQ ID NO: 987

SEQ ID NO: 1516 - protein, 147 aa, Homo sapiens [sequence omitted]

SEQ ID NO: 1517 - protein, 147 aa, Homo sapiens [sequence omitted]

SEQ ID NO: 1518 - protein, 92 aa, Homo sapiens
  SITE (70): Xaa equals any of the naturally occurring L-amino acids
MWQYHRLSCTAWQPVILSFSLSVGHRILLALFFFILHLSILIATECRPWYSFHLVSLPSFLPQFLLCLAXICLFGFTTLLFSFCCQVHVLGH

SEQ ID NO: 1519 - protein, 58 aa, Homo sapiens
  SITE (38): Xaa equals any of the naturally occurring L-amino acids
  SITE (58): Xaa equals any of the naturally occurring L-amino acids
DYILMRQLRPANFCIFSRDRFHPVSQAGLELLTSSDLXAFGLPKYWYYRHEPPCLASX

SEQ ID NO: 1520 - protein, 80 aa, Homo sapiens
  SITE (25): Xaa equals any of the naturally occurring L-amino acids
  SITE (80): Xaa equals any of the naturally occurring L-amino acids
MASWPFLSPMGPIALALLTQALSSXVGLCLALTCSRRPSPDSVCASCRFPLVPLCCQPSLPALLRPVSHCRYPGTSWVSX

SEQ ID NO: 1521 - protein, 56 aa, Homo sapiens
  SITE (46): Xaa equals any of the naturally occurring L-amino acids
VDLVSVNVGSEFLVTLLFFLGPVTGHLDRLNAILELDSYVFICTPXSHLPVASSDA

SEQ ID NO: 1522 - protein, 151 aa, Homo sapiens
  SITE (54): Xaa equals any of the naturally occurring L-amino acids
  SITE (92): Xaa equals any of the naturally occurring L-amino acids
  SITE (95): Xaa equals any of the naturally occurring L-amino acids
  SITE (117): Xaa equals any of the naturally occurring L-amino acids
  SITE (122): Xaa equals any of the naturally occurring L-amino acids
  SITE (128): Xaa equals any of the naturally occurring L-amino acids
  SITE (132): Xaa equals any of the naturally occurring L-amino acids
  SITE (139): Xaa equals any of the naturally occurring L-amino acids
MPLFFTRFHPALGPLALSLLAGFAAGSLQAIGRTEEKGVRVLTSQAPPYRVMGXLHSSTKGFSFCQGVCPRALSLWVTTPLFLPPSPRLAMXPTXSCPGYCHHVSLYPVYALQLVLXQILLXWPNLMXYWYXHLMTGPXSDQKRKSVVTLV

SEQ ID NO: 1523 - protein, 79 aa, Homo sapiens
  SITE (57): Xaa equals any of the naturally occurring L-amino acids
RVDNFLCQFIRIYLILLSSHIIFHNTNVSCYPMESHLLFSYNNTAVSILVHRFFNIXISKFLKVISWDRNRNGIGISKS

SEQ ID NO: 1524 - protein, 121 aa, Homo sapiens
MPLFFTRFHPALGPLALSLLAGFAAGSLQAIGRTEEKGVRVLTSQAPPYRVMGQLHSSTKGFSFCQGVCPRALSLWVTTPLFLPPSPRLAMVPTVSCPGYCPSCFSVSCLCFTTGPSSNSA

SEQ ID NO: 1525 - protein, 91 aa, Homo sapiens
  SITE (19): Xaa equals any of the naturally occurring L-amino acids
MGPVSELSIFILLFVFCFXFSLMPDIRRTLHFWLHSLLYPHETDQCLQSSAIPFQVFYVQQKKRASLSSSSHIIKGIAPLLNQSVNHSGPI

SEQ ID NO: 1526 - protein, 66 aa, Homo sapiens
  SITE (4): Xaa equals any of the naturally occurring L-amino acids
  SITE (13): Xaa equals any of the naturally occurring L-amino acids
STLXVTFICSSRXLLRERGAVLKTNPIPILLKKPLLCPSFIHNLVPHPHLPQLLLFSNFLCRCPYH

SEQ ID NO: 1527 - protein, 91 aa, Homo sapiens
MGPVSELSIFILLFVFCFVFSLMPDIRRTLHFWLHSLLYPHETDQCLQSSAIPFQVFYVQQKKRASLSSSSHIIKGIAPLLNQSVNHSGPI

SEQ ID NO: 1528 - protein, 336 aa, Homo sapiens
MALARPVRLFSLVTRLLLAPRRGLTVRSPDEPLPVVRIPVALQRQLEQRQSRRRNLPRPVLVRPGPLLVSARRPELNQPARLTLGRWERAPLASQGWKSRRARRDHFSIERAQQEAPAVRKLSSKGSFADLGLEPRVLHALQEAAPEVVQPTTVQSSTIPSLLRGRHVVCAAETGSGKTLSYLLPLLQRLLGQPSLDSLPIPAPRGLVLVPSRELAQQVRAVAQPLGRSLGLLVRDLEGGHGMRRIRLQLSRQPSADVLVATPGALWKALKSRLISLEQLSFLVLDEADTLLDESFLELVDYILEKSHIAEGPADLEDPFNPKAQLVLVGATFPEV

SEQ ID NO: 1529 - protein, 336 aa, Homo sapiens
  SITE (224): Xaa equals any of the naturally occurring L-amino acids
MALARPVRLFSLVTRLLLAPRRGLTVRSPDEPLPVVRIPVALQRQLEQRQSRRRNLPRPVLVRPGPLLVSARRPELNQPARLTLGRWERAPLASQGWKSRRARRDHFSIERAQQEAPAVRKLSSKGSFADLGLEPRVLHALQEAAPEVVQPTTVQSSTIPSLLRGRHVVCAAETGSGKTLSYLLPLLQRLLGQPSLDSLPIPAPRGLVLVPSRELAQQVRAVAXPLGRSLGLLVRDLEGGHGMRRIRLQLSRQPSADVLVATPGALWKALKSRLISLEQLSFLVLDEADTLLDESFLELVDYILEKSHIAEGPADLEDPFNPKAQLVLVGATFPEV

SEQ ID NO: 1530 - protein, 93 aa, Homo sapiens [sequence omitted]

SEQ ID NO: 1531 - protein, 219 aa, Homo sapiens
  SITE (41): Xaa equals any of the naturally occurring L-amino acids
AAATAASLSPRGCRLRTPSSDVSPSRAPPPSAAPLPTGRAXMSPSGRLCLLTIVGLILPTRGQTLKDTTSSSSADSTIMDIQVPTRAPDAVYTELQPTSPTPTWPADETPQPQTQTQQLEGTDGPLVTDPETHKSTKAAHPTDDTTTLSERPSPSTDVQTDPQTLKPSGFHEDDPFFYDEHTLRKRGLLVAAVLFITGIIILTSGKCRQLSRLCRNHCR

SEQ ID NO: 1532 - protein, 178 aa, Homo sapiens [sequence omitted]

SEQ ID NO: 1533 - protein, 152 aa, Homo sapiens
MELPAVNLKVILLGHWLLTTWGCIVFSGSYAWANFTILALGVWAVAQRDSIDAISMFLGGLLATIFLDIVHISIFYPRVSLTDTGRFGVGMAILSLLLKPLSCCFVYHMYRERGGFLGSSQDRSAYQTIDSAEAPADPFAVPEGRSQDARGY

SEQ ID NO: 1534 - protein, 159 aa, Homo sapiens
MELPAVNLKVILLGHWLLTTWGCIVFSGSYAWANFTILALGVWAVAQRDSIDAISMFLGGLLATIFLDIVHISIFYPRVSLTDTGRFGVGMAILSLLLKPLSCCFVYHMYRERGGELLVHTGFLGSSQDRSAYQTIDSAEAPADPFAVPEGRSQDARGY

SEQ ID NO: 1535 - protein, 91 aa, Homo sapiens
MPLAPLLLVLSPFSFDQVVQARLEVPVFKQRDLCNYVLILVGAQLKPLAMLVKNIRDYRLEPPCPACIDTFYPTFKTGMFSLCFKMPLKYF

SEQ ID NO: 1536 - protein, 64 aa, Homo sapiens
SATHQQALVCDVLLPVSMCSHENLYILCSGVSYFIFFFSCVTSVTSGLGIPSYPEVRKYSSIFF

SEQ ID NO: 1537 - protein, 91 aa, Homo sapiens; identical to SEQ ID NO: 1535

SEQ ID NO: 1538 - protein, 112 aa, Homo sapiens
  SITE (93): Xaa equals any of the naturally occurring L-amino acids
  SITE (98): Xaa equals any of the naturally occurring L-amino acids
  SITE (104): Xaa equals any of the naturally occurring L-amino acids
  SITE (106): Xaa equals any of the naturally occurring L-amino acids
MDLWTTSFFFFAVMHNAAMNINVQVSESGFSFWGRYLGVELLGCVVNLYLFKKWPNCFLNGCIILHPHQQYIRVSCFSTSYLLMAFKNYRHSXKCEVXPHCSLXCXFLITMM

SEQ ID NO: 1539 - protein, 113 aa, Homo sapiens [sequence omitted]

SEQ ID NO: 1540 - protein, 113 aa, Homo sapiens [sequence omitted]

SEQ ID NO: 1541 - protein, 111 aa, Homo sapiens
MRMSLADSLACSVCVALTAAARLLRSRPSSCSSFSWISGTSSSPSFLGSFTSLLGSSLSSLGDSLLGRGTLGNFWEVLISTSTSSWADFSSLVSTSPKVRVPLRPIFTCFL

SEQ ID NO: 1542 - protein, 148 aa, Homo sapiens
  SITE (3): Xaa equals any of the naturally occurring L-amino acids
  SITE (37): Xaa equals any of the naturally occurring L-amino acids
  SITE (41): Xaa equals any of the naturally occurring L-amino acids
  SITE (43): Xaa equals any of the naturally occurring L-amino acids
  SITE (99): Xaa equals any of the naturally occurring L-amino acids
  SITE (121): Xaa equals any of the naturally occurring L-amino acids
GFXAAAAAAAVVAAAAAASVEGRQPPGLGAVGPAGRXAGSXGXRMPAGRVAGAVTGLGVSWLRGKNSGVPGAALPPAAPSVASLVAHSGPAVGPPLSPXSVPQGGYSKSGLPLQDAGSPWXHCRGTDCGSSMLNGVEAGLAAAASCCH

SEQ ID NO: 1543 - protein, 191 aa, Homo sapiens
  SITE (180): Xaa equals any of the naturally occurring L-amino acids
  SITE (181): Xaa equals any of the naturally occurring L-amino acids
  SITE (190): Xaa equals any of the naturally occurring L-amino acids
MSSNTMLQKTLLILISFSVVTWMIFIISQNFTKLWSALNLSISVHYWNNSAKSLFPKTSLIPLKPLTETELRIKEIIEKLDQQIPPRPFTHVNTTTSATHSTATILNPRDTYCRGDQLDILLEVRDHLGQRKQYGGDFLRARMSFPALTAGASGKVMDFTMAPTWQLHSGLGGPGLPGSXXYSPQVEGAXG

SEQ ID NO: 1544 - protein, 165 aa, Homo sapiens
  SITE (2): Xaa equals any of the naturally occurring L-amino acids
  SITE (5): Xaa equals any of the naturally occurring L-amino acids
  SITE (7): Xaa equals any of the naturally occurring L-amino acids
  SITE (28): Xaa equals any of the naturally occurring L-amino acids
  SITE (33): Xaa equals any of the naturally occurring L-amino acids
NXFAXWXQKDTLRIQWKKHSYPFVTFQXYSLIXHDYIPREIDRLSGDKNTAIVITFGQHFRPFPIDIFIRRAIGVQKAIERLFLRSPATKVIIKTENIREMHIETERFGDFHGYIHYLIMKDIFKDLNVGIIDAWDMTIAYGTDTIHPPDHVIGNQINMFLNYIC

SEQ ID NO: 1545 - protein, 303 aa, Homo sapiens
  SITE (176): Xaa equals any of the naturally occurring L-amino acids
  SITE (177): Xaa equals any of the naturally occurring L-amino acids
  SITE (179): Xaa equals any of the naturally occurring L-amino acids
  SITE (192): Xaa equals any of the naturally occurring L-amino acids
  SITE (294): Xaa equals any of the naturally occurring L-amino acids
  SITE (297): Xaa equals any of the naturally occurring L-amino acids
  SITE (302): Xaa equals any of the naturally occurring L-amino acids
MSSNTMLQKTLLILISFSVVTWMIFIISQNFTKLWSALNLSISVHYWNNSAKSLFPKTSLIPLKPLTETELRIKEIIEKLDQQIPPRPFTHVNTTTSATHSTATILNPRDTYCRGDQLDILLEVRDHLGQRKQYGGDFLRARMSSPALTAGASGKVMDFNNGTYLVSFTLFWEGQXXLXLLLIHPSEGASAXWRARNQGYDKIIFKGKFVNGTSHVFTECGLTLNSNAELCEYLDDRDQEAFYCMKPQHMPCEALTYMTTRNREVSYLTDKENSLFHRSKVGVEMMKDRKHIDXTNXNKREXI

SEQ ID NO: 1546 - protein, 1 aa, Homo sapiens
M

SEQ ID NO: 1547 - protein, 547 aa, Homo sapiens
MSSNTMLQKTLLILISFSVVTWMIFIISQNFTKLWSALNLSISVHYWNNSAKSLFPKTSLIPLKPLTETELRIKEIIEKLDQQIPPRPFTHVNTTTSATHSTATILNPRDTYCRGDQLDILLEVRDHLGQRKQYGGDFLRARMSSPALTAGASGKVMDFNNGTYLVSFTLFWEGQVSLSLLLIHPSEGASALWRARNQGYDKIIFKGKFVNGTSHVFTECGLTLNSNAELCEYLDDRDQEAFYCMKPQHMPCEALTYMTTRNREVSYLTDKENSLFHRSKVGVEMMKDRKHIDVTNCNKREKIEETCQVGMKPPVPGGYTLQGKWITTFCNQVQLDTIKINGCLKGKLIYLLGDSTLRQWIYYFPKVVKTLKFFDLHETGIFKKHLLLDAERHTQIQWKKHSYPFVTFQLYSLIDHDYIPREIDRLSGDKNTAIVITFGQHFRPFPIDIFIRRAIGVQKAIERLFLRSPATKVIIKTENIREMHIETERFGDFHGYIHYLIMKDIFKDLNVGIIDAWDMTIAYGTDTIHPPDHVIGNQINMFLNYIC

SEQ ID NO: 1548 - protein, 246 aa, Homo sapiens
  SITE (30): Xaa equals any of the naturally occurring L-amino acids
  SITE (212): Xaa equals any of the naturally occurring L-amino acids
  SITE (220): Xaa equals any of the naturally occurring L-amino acids
  SITE (243): Xaa equals any of the naturally occurring L-amino acids
MASAVRGSRPWPRLGLQLQFAALLLGTLSXQVHTLRPENLLLVSTLDGSLHALSKQTGDLKWTLRDDPVIEGPMYVTEMAFLSDPADGSLYILGTQKQQGLMKLPFTIPELVHASPCRSSDGVFYTGRKQDAWFVVDPESGETQMTLTTEGPSTPRLYIGRTQYTVTMHDPRAPALRWNTTYRRYSTPPMDGSTGKYMSQLGVLREGPAAHXGTPGSGTXLLDTRNLGRALGNGPATPLGTKXRAW

SEQ ID NO: 1549 - protein, 473 aa, Homo sapiens
  SITE (321): Xaa equals any of the naturally occurring L-amino acids
  SITE (386): Xaa equals any of the naturally occurring L-amino acids
  SITE (391): Xaa equals any of the naturally occurring L-amino acids
MASAVRGSRPWPRLGLQLQFAALLLGTLSPQVHTLRPENLLLVSTLDGSLHALSKQTGDLKWTLRDDPVIEGPMYVTEMAFLSDPADGSLYILGTQKQQGLMKLPFTIPELVHASPCRSSDGVFYTGRKQDAWFVVDPESGETQMTLTTEGPSTPRLYIGRTQYTVTMHDPRAPALRWNTTYRRYSAPPMDGSPGKYMSHLASCGMGLLLTVDPGSGTVLWTQDLGVPVMGVYTWHQDGLRQLPHLTLARDTLHFLALRWGHIRLPASGPRDTATLFSTLDTQLLMTLYVGKDETGFYVSKALVHTGVALVPRGLTLAPAXGPTTDEVTLQVSGEREGSPSTAVRYPSGSVALPSQWLLIGHHELPPVLHTTMLRVHPTLGSGTAXTRPPXNTQAPAFFLELLSLSREKLWDSELHPEEKTPDSYLGLGPQDLLAASLTAVLLGGWILFVMRQQQPQVVEKQQETPLAPAAWG

SEQ ID NO: 1550 - protein, 98 aa, Homo sapiens
MCMRLCAALLPAPCTLRASWGVRGAQWGFSSLHEPGDPRGGSIWDEPPPPNAQASPQDPGGGHHSGKPGVGVGFGLSTFLLQIPPTHPSPKSSPLALA

SEQ ID NO: 1551 - protein, 98 aa, Homo sapiens; identical to SEQ ID NO: 1550

SEQ ID NO: 1552 - protein, 94 aa, Homo sapiens [sequence omitted]

SEQ ID NO: 1553 - protein, 49 aa, Homo sapiens
  SITE (1): Xaa equals any of the naturally occurring L-amino acids
  SITE (2): Xaa equals any of the naturally occurring L-amino acids
XXYDEKLIFIQILQTKATDKYSEQVSQVGPGAVLTPVIPALWEAEAGGS

SEQ ID NO: 1554 - protein, 141 aa, Homo sapiens
  SITE (140): Xaa equals any of the naturally occurring L-amino acids
MGPRGCALAHSLLPLLCQHVWTSPRYCRQCTREPRHCCPAPASAGVQYMCAYGCHHPTFAGVYTPSHTTVATSICTQTPPHQCCWSEHTHVVSTTPLLPAYMHMSMDPAATTQMKCFCRHPIRAFLPVEWEHLSPFNTAXA

SEQ ID NO: 1555 - protein, 141 aa, Homo sapiens [sequence omitted]

SEQ ID NO: 1556 - protein, 93 aa, Homo sapiens
MIVNISHEIWWFYKGKVPLHMLTCLLPCKTCLAPPSPSSVTVRPPQPCETVSPLKLFFFINYPVLHMSLLTVRKWTNTLGHEGGALINGISAL

SEQ ID NO: 1557 - protein, 59 aa, Homo sapiens
EEHGITSVIFLPQVHNLNLIIRKHQTNPNQETLYKIMTCDPQNLQGHEQQGKTEDKCTV

SEQ ID NO: 1558 - protein, 93 aa, Homo sapiens; identical to SEQ ID NO: 1556

SEQ ID NO: 1559 - protein, 100 aa, Homo sapiens
  SITE (62): Xaa equals any of the naturally occurring L-amino acids
  SITE (85): Xaa equals any of the naturally occurring L-amino acids
  SITE (88): Xaa equals any of the naturally occurring L-amino acids
  SITE (95): Xaa equals any of the naturally occurring L-amino acids
  SITE (99): Xaa equals any of the naturally occurring L-amino acids
MLLQRTRFLLLFFSFVSSFFLSLPSFSLFFLFLSLSLFCIHVAAKDMISSFFSLPFSFLSFXLSFLLPSFSFFYFFFFWLSFFFXSKXLALVPKXGMQXV

SEQ ID NO: 1560 - protein, 87 aa, Homo sapiens
  SITE (71): Xaa equals any of the naturally occurring L-amino acids
  SITE (86): Xaa equals any of the naturally occurring L-amino acids
MVVMASLQVEPAVGKEQLRERQGPELLGWVAGLAFVCLFACVGVGVAPCHSFDSEAASFLLLYSWCTPRLXSWLRDTPSPLASGTXP

SEQ ID NO: 1561 - protein, 49 aa, Homo sapiens
VRAMFGFLACVSSLRVMASSSSHVTSEDMILFLISCGIYVPHFLYPVDR

SEQ ID NO: 1562 - protein, 168 aa, Homo sapiens [sequence omitted]

SEQ ID NO: 1563 - protein, 200 aa, Homo sapiens
  SITE (140): Xaa equals any of the naturally occurring L-amino acids
  SITE (155): Xaa equals any of the naturally occurring L-amino acids
  SITE (165): Xaa equals any of the naturally occurring L-amino acids
  SITE (173): Xaa equals any of the naturally occurring L-amino acids
  SITE (194): Xaa equals any of the naturally occurring L-amino acids
  SITE (196): Xaa equals any of the naturally occurring L-amino acids
MAVYVGMLRLGRLCAGSSGVLGARAALSRSWQEARLQGVRFLSSREVDRMVSTPIGGLSYVQGCTKKHLNSKTVGQCLETTAQRVPEREALVVLHEDVRLTFAQLKEEVDKAASGLLSIGLCKGDRLGMWGPNSYAWVLXQLATGQAGIILVSVXPAYQAMEWSXSSKKWASXALVVPKQFKTKHNTTFLKQIXPXWRMP

SEQ ID NO: 1564 - protein, 100 aa, Homo sapiens
  SITE (3): Xaa equals any of the naturally occurring L-amino acids
  SITE (12): Xaa equals any of the naturally occurring L-amino acids
  SITE (57): Xaa equals any of the naturally occurring L-amino acids
  SITE (62): Xaa equals any of the naturally occurring L-amino acids
  SITE (80): Xaa equals any of the naturally occurring L-amino acids
MAXYVGMLRLGXLCAGSSGVLGARAALSRSWQEARLQGVRFLSSREVGSHGLHAHRXASATXRGAPKSILTARLWASAWXPQHRGSQNERPWSSSMKTSG

SEQ ID NO: 1565 - protein, 461 aa, Homo sapiens
  SITE (424): Xaa equals any of the naturally occurring L-amino acids
  SITE (459): Xaa equals any of the naturally occurring L-amino acids
MAVYVGMLRLGRLCAGSSGVLGARAALSRSWQEARLQGVRFLSSREVDRMVSTPIGGLSYVQGCTKKHLNSKTVGQCLETTAQRVPEREALVVLHEDVRLTFAQLKEEVDKAASGLLSIGLCKGDRLGMWGPNSYAWVLMQLATAQAGIILVSVNPAYQAMELEYVLKKVGCKALVFPKQFKTQQYYNVLKQICPEVENAQPGALKSQRLPDLTTVISVDAPLPGTLLLDEVVAAGSTRQHLDQLQYNQQFLSCHDPINIQFTSGTTGSPKGATLSHYNIVNNSNILGERLKLHEKTPEQLRMILPNPLYHCLGSVAGTMMCLMYGATLILASPIFNGKKALEAISRERGTFLYGTPTMFVDILNQPDFSSYDISTMCGGVIAGSPAPPELIRAIINKINMKDLVVAYGTTENSPVTFAHFPEXTPKPLDKEKRAEYASHGGEPLTKTSKSHLPSPSWXGS

SEQ ID NO: 1566 - protein, 177 aa, Homo sapiens
  SITE (121): Xaa equals any of the naturally occurring L-amino acids
  SITE (122): Xaa equals any of the naturally occurring L-amino acids
MKVLATSFVLGSLGLAFYLPLVVTTPKTLAIPEKLQEAVGKVIINATTCTVTCGLGYKEETVCEVGPDGVRRKCQTRRLECLTNWICGMLHFTILIGKEFELSCLSSDILEFGQEAFRFTXXLARGVISTDDEVFKPFQANSHFVKFKYAQEYDSGTYRCDVQLVKNLRLVKSSILG

SEQ ID NO: 1567 - protein, 255 aa, Homo sapiens
MKVLATSFVLGSLGLAFYLPLVVTTPKTLAIPEKLQEAVGKVIINATTCTVTCGLGYKEETVCEVGPDGVRRKCQTQRLECLTNWICGMLHFTILIGKEFELSCLSSDILEFGQEAFRFTWRLARGVISTDDEVFKPFQANSHFVKFKYAQEYDSGTYRCDVQLVKNLRLVKRLYFGLRVLPPNLVNLNFHQSLTEDQKLIDEGLEVNLDSYSKPHHPKWKKKVASALGIGIAIGVVGGVLVRIVLCALRGGLQQ

SEQ ID NO: 1568 - protein, 255 aa, Homo sapiens
MKVLATSFVLGSLGLAFYLPLVVTTPKTLAIPEKLQEAVGKVIINATTCTVTCGLGYKEETVCEVGPDGVRRKCQTRRLECLTNWICGMLHFTILIGKEFELSCLSSDILEFGQEAFRFTWRLARGVISTDDEVFKPFQANSHFVKFKYAQEYDSGTYRCDVQLVKNLRLVKRLYFGLRVLPPNLVNLNFHQSLTEDQKLIDEGLEVNLDSYSKPHHPKWKKKVASALGIGIAIGVVGGVLVRIVLCALRGGLQQ

SEQ ID NO: 1569 - protein, 52 aa, Homo sapiens
  SITE (46): Xaa equals any of the naturally occurring L-amino acids
MVPIFLLKCLLLHVPLCMSSNLSFHSSHHLHIFLPSFSSHLPRPLXIPPLSP

SEQ ID NO: 1570 - protein, 1134 aa, Homo sapiens
VLFRPQAQRPPSCVGGSAVRRWQGQPQPQRPGEEKAAAAILGGPGGGEEEKEEGGGRAWLRLLEELAAARPGEPALMSSSPLSKKRRVSGPDPKPGSNCSPAQSVLSEVPSVPTNGMAKNGSEADIDEGLYSRQLYVLGHEAMKRLQTSSVLVSGLRGLGVEIAKNIILGGVKAVTLHDQGTAQWADLSSQFYLREEDIGKNRAEVSQPRLAELNSYVPVTAYTGPLVEDFLSGFQVVVLTNTPLEDQLRVGEFCHNRGIKLVVADTRGLFGQLFCDFGEEMILTDSNGEQPLSAMVSMVTKDNPGVVTCLDEARHGFESGDFVSFSEVQGMVELNGNQPMEIKVLGPYTFSICDTSNFSDYIRGGIVSQVKVPKKISFKSLVASLAEPDFVVTDFAKFSRPAQLHIGFQALHQFCAQHGRPPRPRNEEDAAELVALAQAVNARALPAVQQNNLDEDLIRKLAYVAAGDLAPINAFIGGLAAQEVMKACSGKFMPIMQWLYFDALECLPEDKEVLTEDKCLQRQNRYDGQVAVFGSDLQEKLGKQKYFLVGAGAIGCELLKNFAMIGLGCGEGGEIIVTDMDTIEKSNLNRQFLFRPWDVTKLKSDTAAAAVRQMNPHIRVTSHQNRVGPDTERIYDDDFFQNLDGVANALDNVDARMYMDRRCVYYRKPLLESGTLGTKGNVQVVIPFLTESYSSSQDPPEKSIPICTLKNFPNAIEHTLQWARDEFEGLFKQPAENVNQYLTDPKFVERTLRLAGTQPLEVLEAVQRSLVLQRPQTWADCVTWACHHWHTQYSNNIRQLLHNFPPDQLTSSGAPFWSGPKRCPHPLTFDVNNPLHLDYVMAAANLFAQTYGLTGSQDRAAVATFLQSVQVPEFTPKSGVKIHVSDQELQSANASVDDSRLEELKATLPSPDKLPGFKMYPIDFEKDDDSNFHMDFIVAASNLRAENYDIPSADRHKSKLIAGKIIPAIATTTAAVVGLVCLELYKVVQGHRQLDSYKNGFLNLALPFFGFSEPLAAPRHQYYNQEWTLWDRFEVQGLQPNGEEMTLKQFLDYFKTEHKLEITMLSQGVSMLYSFFMPAAKLKERLDQPMTEIVSRVSKRKLGRHVRALVLELCCNDESGEDVEVPYVRYTIR

SEQ ID NO: 1571 - protein, 125 aa, Homo sapiens
MVPIFLLKCLLLHVPLCMSSNLSFHSSHHLHIFLPSFSSHLPRPLYIPPLSPFYIFSISPHIFPLCPHLCIPPNFPSIYLFYSPFPPCILCVPPILLYIILPKIFTSPILISPSPLSPNIFISVP

SEQ ID NO: 1572 - protein, 125 aa, Homo sapiens; identical to SEQ ID NO: 1571

SEQ ID NO: 1573 - protein, 124 aa, Homo sapiens
  SITE (63): Xaa equals any of the naturally occurring L-amino acids
  SITE (86): Xaa equals any of the naturally occurring L-amino acids
MVVAVLLGFVAMVLSVVGMKCTRVGDSNPIAKGRVAIAGGALFILAGLCTLTAVSWYATLVTXEFFNPSTPVNARYEFGPALFVGXDSAGLAVLSGSFLCCTCPEPERPNSSPQALSAWTLCCC

SEQ ID NO: 1574 - protein, 97 aa, Homo sapiens
  SITE (49): Xaa equals any of the naturally occurring L-amino acids
NSARDQASGESIHHRTSPSLPRTFLGQLHSGLLHHLPCDHISHHVPRSXERSSASPSSLTLRGKVTETKSDEMTAMYTAVKGREGRNDTNGRELLGN

SEQ ID NO: 1575 - protein, 128 aa, Homo sapiens
MVVAVLLGFVAMVLSVVGMKCTRVGDSNPIAKGRVAIAGGALFILAGLCTLTAVSWYATLVTQEFFNPSTPVNARYEFGPALFVGWASAGLAVLGGSFLCCTCPEPERPNSSPQPYRPGPSAAAREYV

SEQ ID NO: 1576 - protein, 100 aa, Homo sapiens
MVRTRALFYIFFQLSLTSGLIEDSCILIIIYLFFFRWCLALSPMLECSGVTLAHCNHHLLGRLRQENRLNLGGGDCSELRLHHCTLACVTSKTLSHTHTK

SEQ ID NO: 1577 - protein, 100 aa, Homo sapiens; identical to SEQ ID NO: 1576

SEQ ID NO: 1578 - protein, 118 aa, Homo sapiens
CRGDIQIRDKGEAMLRKTLDRAHFTPPNRYIWIYPFSASSFSTIKNVTILNAHKSHSSVTFCECSTIFSFSMTFQPQAEKTVYSLTQRLKRIFYYFKYYTFRTITCLRKLSQNVDLVK

SEQ ID NO: 1579 - protein, 181 aa, Homo sapiens
  SITE (132): Xaa equals any of the naturally occurring L-amino acids
  SITE (139): Xaa equals any of the naturally occurring L-amino acids
  SITE (168): Xaa equals any of the naturally occurring L-amino acids
  SITE (170): Xaa equals any of the naturally occurring L-amino acids
  SITE (181): Xaa equals any of the naturally occurring L-amino acids
MNLSTALLFLNLLFLLDGWITSFNVDGLCIAVAVLLHFFLLATFTWMGLEAIHMYIALVKVFNTYIRRYILKFCIIGWGLPALVVSVVLASRNNNEVYGKESYGKEKGDEFCWIQDPVIFYVTCAGYFGVMXFLNIAMXIVVMVQICGRNGKRSNRTLREEVVRNLRXVXSLTFLVGMTWX

SEQ ID NO: 1580 - protein, 320 aa, Homo sapiens
  SITE (168): Xaa equals any of the naturally occurring L-amino acids
MNLSTALLFLNLLFLLDGWITSFNVDGLCIAVAVLLHFFLLATFTWMGLEAIHMYIALVKVFNTYIRRYILKFCIIGWGLPALVVSVVLASRNNNEVYGKESYGKEKGDEFCWIQDPVIFYVTCAGYFGVMFFLNIAMFIVVMVQICGRNGKRSNRTLREEVLRNLRXVVSLTFLLGMTWGFAFFAWGPLNIPFMYLFSIFNSLQGLFIFIFHCAMKENVQKQWRRHLCCGRFRLADNSDWSKTATNIIKKSSDNLGKSLSSSSIGSNSTYLTSKSKSSSTTYFKRNSHTDNVSYEHSFNKSGSLRQCFHGQVLVKTGPC

SEQ ID NO: 1581 - protein, 131 aa, Homo sapiens
NIFLEWILRRILSLWRGTFLMHGRAGVNRISYWPADPEISLLTEASSSEDAKLDAKAVERLKSNSRAHVCVLLQPLVCYMVQFVEETSYKCDFIQKITKTLPDANTDFYYECKQERIKEYEMLKKKKKKKT

SEQ ID NO: 1582 - protein, 87 aa, Homo sapiens
MTGQIPRLSKVNLFTLLSLWMELFPAEAQRQKSQKNEEGKHGPLGDNEERTRVSTDKRQKTMFCLFENDCKCKALRVMIRSMSRSVP

SEQ ID NO: 1583 - protein, 87 aa, Homo sapiens; identical to SEQ ID NO: 1582

SEQ ID NO: 1584 - protein, 113 aa, Homo sapiens
MSPSPRWGFLCVLFTAVHPAPSTAPVQDKCPVNTWEAMQASSQQLLQTDPRPKPFLLPPLPPLLLISAGTEVSSLVFQKSPLHTQPEGAIKTAGQPTSVHSKVLSKGSLLLGE

SEQ ID NO: 1585 - protein, 94 aa, Homo sapiens [sequence omitted]

SEQ ID NO: 1586 - protein, 133 aa, Homo sapiens
HQAIKPGYSAENVAHTDHTLGCVTIVWCTCWKNSSMLLGDIISVGNMPLTDFFFFLFAVGLGQLIQQSIFFFFLSPNLNRSKMCSGIPGNRCVCKVKNRLFRNSLFRYLHPASHVKYLSLKGLRCTSFISYFS

SEQ ID NO: 1587 - protein, 94 aa, Homo sapiens [sequence omitted]

SEQ ID NO: 1588 - protein, 215 aa, Homo sapiens
  SITE (116): Xaa equals any of the naturally occurring L-amino acids
MELSCPGSRCPVQEQRARWERKRACTARELLETERRYQEQLGLVATYFLGILKAKGTLRPPERQALFGSWELIYGASQELLPYLEGGCWGQGLEGFCRHLELYNQFAANSERSQTXLQEQLKKNKGFRKFVRLQEGRPEFGGLQLQDLLPLPLQRLQQYENLVVALAENTGPNSPDHQQLTRRFLLLGNAGWRLPLLYSFLILTSNNVWYDPIFH

SEQ ID NO: 1589 - protein, 69 aa, Homo sapiens
EILLKKKNQETKSNPTKPQMNQPLTQMRGFGTDKLCAVSMARHLSRLQLCKCGYFYVVYSFYHLFFHWI

SEQ ID NO: 1590 - protein, 211 aa, Homo sapiens
  SITE (21): Xaa equals any of the naturally occurring L-amino acids
  SITE (104): Xaa equals any of the naturally occurring L-amino acids
MSGMTLSSTDMYTVSLLLCLXFKKSDPDPGPFQNNLFHNHGTQSQSCMGSKVGDVIPGAARLISETAQRVHTIGQKQKNDQHLRRVQALLSGRQAKGLTSGRWXLRQGWLLVVPPHGEPRPRMFFLFTDVLLMAKPRPPLHLLRSGTFACKALYPMAQCHLSRVFGHSGGPCGGLLSLSFPREKLLLMSTDQEELSRWYHSLTWAISSQKN

SEQ ID NO: 1591 - protein, 349 aa, Homo sapiens
  SITE (183): Xaa equals any of the naturally occurring L-amino acids
  SITE (191): Xaa equals any of the naturally occurring L-amino acids
  SITE (192): Xaa equals any of the naturally occurring L-amino acids
  SITE (334): Xaa equals any of the naturally occurring L-amino acids
  SITE (344): Xaa equals any of the naturally occurring L-amino acids
  SITE (345): Xaa equals any of the naturally occurring L-amino acids
  SITE (348): Xaa equals any of the naturally occurring L-amino acids
MFLDRPQQWLQLVLLPPALFIPSTENEEQRLASARAVPRNVQPYVVYEEVTNVWINVHDIFYPFPQSEGEDELCFLRANECKTGFCHLYKVTAVLKSQGYDWSEPFSPGEDEFKCPIKEEIALTSGEWEVLARHGSKIWVNEETKLVYFQGTKDTPLEHHLYVVSYEAAGEIVRLTTPGFSHXCSMSQNFXXFVSHITAQVAAASAGNQAGGTEWPAGPSEALCPAQRWPAPRSRCLHRPDAFYPFLNALGFYVRCFLVAETERWWSRASPSSPRLLGGGGHTLMGTGEARRDSEERAAFRLGLPVTSQSPGPASHRPQHPSMQLPVPPGQPPXLDVCVLFGGXXFIXI

SEQ ID NO: 1592 - protein, 144 aa, Homo sapiens
APFLPKPEQRVMRAPQEKRPGPAGGTTCGQPSCPQAFRQALKRTELPRSAGQWRLSPPQPSRPATCVCLTRTHQGFRGWELNHPHLRVIFPSPLPSPPRALPGAGKKKSKKKRKKKKRNKPPLHIMERKYFCRFLFFYNYAWKK

SEQ ID NO: 1593 - protein, 497 aa, Homo sapiens
  SITE (183): Xaa equals any of the naturally occurring L-amino acids
MFLDRPQQWLQLVLLPPALFIPSTENEEQRLASARAVPRNVQPYVVYEEVTNVWINVHDIFYPFPQSEGEDELCFLRANECKTGFCHLYKVTAVLKSQGYDWSEPFSPGEDEFKCPIKEEIALTSGEWEVLARHGSKIWVNEETKLVYFQGTKDTPLEHHLYVVSYEAAGEIVRLTTPGFSHXCSMSQNFDMFVSHYSSVSTPPCVHVYKLSGPDDDPLHKQPRFWASMMEAASCPPDYVPPEIFHFHTRSDVRLYGMIYKPHALQPGKKHPTVLFVYGGPQVQLVNNSFKGIKYLRLNTLASLGYAVVVIDGRGSCQRGLRFEGALKNQMGQVEIEDQVEGLQFVAEKYGFIDLSRVAIHGWSYGGFLSLMGLIHKPQVFKVAIAGAPVTVWMAYDTGYTERYMDVPENNQHGYEAGSVALHVEKLPNEPNRLLILHGFLDENVHFFHTNFLVSQLIRAGKPYQLQIYPNERHSIRCPESGEHYEVTLLHFLQEYL

SEQ ID NO: 1594 - protein, 497 aa, Homo sapiens
MFLDRPQQWLQLVLLPPALFIPSTENEEQRLASARAVPRNVQPYVVYEEVTNVWINVHDIFYPFPQSEGEDELCFLRANECKTGFCHLYKVTAVLKSQGYDWSEPFSPGEDEFKCPIKEEIALTSGEWEVLARHGSKIWVNEETKLVYFQGTKDTPLEHHLYVVSYEAAGEIVRLTTPGFSHSCSMSQNFDMFVSHYSSVSTPPCVHVYKLSGPDDDPLHKQPRFWASMMEAASCPPDYVPPEIFHFHTRSDVRLYGMIYKPHALQPGKKHPTVLFVYGGPQVQLVNNSFKGIKYLRLNTLASLGYAVVVIDGRGSCQRGLRFEGALKNQMGQVEIEDQVEGLQFVAEKYGFIDLSRVAIHGWSYGGFLSLMGLIHKPQVFKVAIAGAPVTVWMAYDTGYTERYMDVPENNQHGYEAGSVALHVEKLPNEPNRLLILHGFLDENVHFFHTNFLVSQLIRAGKPYQLQIYPNERHSIRCPESGEHYEVTLLHFLQEYL

SEQ ID NO: 1595 - protein, 180 aa, Homo sapiens
MTSVSQASLDVSMIIIISLGAICAVLLVIMVLFATRCNREKKDTRSYNCRVAESTYQHHPKRPSRQIHKGDITLVPTINGTLPIRSHHRSSPSSSPTLERGQMGSRQSHNSHQSLNSLVTISSNHVPENFSLELTHATPAVERLSASFNASPGAISAKTKFSRKQIFQELQICPSRHGQI

SEQ ID NO: 1596 - protein, 240 aa, Homo sapiens
MTSVSQASLDVSMIIIISLGAICAVLLVIMVLFATRCNREKKDTRSYNCRVAESTYQHHPKRPSRQIHKGDITLVPTINGTLPIRSHHRSSPSSSPTLERGQMGSRQSHNSHQSLNSLVTISSNHVPENFSLELTHATPAVEVSQLLSMLHQGQYQPRPSFRGNKYSRSYRYALQDMDKFSLKDSGRGDSEAGDSDYDLGRDSPIDRLLGEGFSDLFLTDGRIPASYETLHGGVQGPGTL

SEQ ID NO: 1597 - protein, 447 aa, Homo sapiens
MTSVSQASLDVSMIIIISLGAICAVLLVIMVLFATRCNREKKDTRSYNCRVAESTYQHHPKRPSRQIHKGDITLVPTINGTLPIRSHHRSSPSSSPTLERGQMGSRQSHNSHQSLNSLVTISSNHVPENFSLELTHATPAVEVSQLLSMLHQGQYQPRPSFRGNKYSRSYRYALQDMDKFSLKDSGRGDSEAGDSDYDLGRDSPIDRLLGEGFSDLFLTDGRIPAAMRLCTEECRVLGHSDQCWMPPLPSPSSDYRSNMFIPGEEFPTQPQQQHPHQSLEDDAQPADSGEKKKSFSTFGKDSPNDEDTGDTSTSSLLSEMSSVFQRLLPPSLDTYSECSEVDRSNSLERRKGPLPAKTVGYPQGVAAWAASTHFQNPTTNCGPPLGTHSSVQPSSKWLPAMEEIPENYEEDDFDNVLNHLNDGKHELMDASELVAEINKLLQDVRQS

SEQ ID NO: 1598 - protein, 95 aa, Homo sapiens
  SITE (46): Xaa equals any of the naturally occurring L-amino acids
MTSYILISFVLLIGVGCIEKDQSCPVFGGRKRLHLLFVGGQLRQVXLGAPRPPGGQDPSHQRLGRGELPLVRQHHRDLHHRGPHQEGLQVHHQHE

SEQ ID NO: 1599 - protein, 152 aa, Homo sapiens
  SITE (1): Xaa equals any of the naturally occurring L-amino acids
XPSWWGPRWCRSSCGVARTRVVHPVRVADGLDLALLEVGELPAGHALLAVLVVELHVAARLDPANYPSLLLGDGRHDHLGRGPEVGCPVAEHHAGGLIDASGDGVDGGFHINHRDPFPEDSGFASDALNTAHGIQERSDLQGRPAVTEKTRH

SEQ ID NO: 1600 - protein, 82 aa, Homo sapiens
MRTWASLALGLTRALGGMGSFLLRILGWSWAMGSRSRARWPRGRLGFTSMLSCMRQCSVCRMIMSLVEVLVATSQVVKLWSR

SEQ ID NO: 1601 - protein, 306 aa, Homo sapiens
  SITE (171): Xaa equals any of the naturally occurring L-amino acids
  SITE (180): Xaa equals any of the naturally occurring L-amino acids
  SITE (182): Xaa equals any of the naturally occurring L-amino acids
  SITE (188): Xaa equals any of the naturally occurring L-amino acids
  SITE (208): Xaa equals any of the naturally occurring L-amino acids
  SITE (210): Xaa equals any of the naturally occurring L-amino acids
  SITE (211): Xaa equals any of the naturally occurring L-amino acids
  SITE (218): Xaa equals any of the naturally occurring L-amino acids
  SITE (219): Xaa equals any of the naturally occurring L-amino acids
MALRLLRRAARGAAAAALLRLKASLAADIPRLGYSSSSHHKYIPRRAVLYVPGNDEKKIKKIPSLNVDCAVLDCEDGVAANKKNEARLRIVKTLEDIDLGPTEKCVRVNSVSSGLAEEDLETLLQSRVLPSSLMLPKVESPEEIQWAVCEETLKVGPQVGLFLDAVRFWRXRLSSHIGAXSXKETLDXLYARQKIVVIAKAFGLQAVXLXXIDFRDGXXLLRQSREGAAMGFTGKQVIHPNQIAVVQEQFSPSPEKIKWAEELIAAFKEHQQLGKGAFTFQGSMIDMPLLKQAQNTVTLATSIKEK

SEQ ID NO: 1602 - protein, 92 aa, Homo sapiens
MEDRLLLILVFPLLWFPVAVFQLVLLLPFLLIHSLNCLEWRHLFSAYRVHILAWLAYPCFCVSLRVRHCIELFIQIVLSLPQCCGIGGVPIL

SEQ ID NO: 1603 - protein, 69 aa, Homo sapiens
  SITE (59): Xaa equals any of the naturally occurring L-amino acids
MPTSILLTWHLLTWHLLGCHKTDKSFHVRLDTCQGGVSKLGHRQHPRPGHWVEETVLGXTRREGPGLFP

SEQ ID NO: 1604 - protein, 69 aa, Homo sapiens
MPTSILLTWHLLTWHLLGCHKTDKSFHVRLDTCQGGVSKLGHRQHPRPGHWVEETVLGRSRREGPGLFP

SEQ ID NO: 1605 - protein, 76 aa, Homo sapiens
  SITE (67): Xaa equals any of the naturally occurring L-amino acids
  SITE (74): Xaa equals any of the naturally occurring L-amino acids
MIWRSRAGAELFSLMALWEWIALSLHCWVLAVAAVSDQHATSPFDWLLSDKGPFHRSQEYTDFVDRXRQGFSTXYK

SEQ ID NO: 1606 - protein, 201 aa, Homo sapiens [sequence omitted]

SEQ ID NO: 1607 - protein, 23 aa, Homo sapiens
MSACTATSSWPGPSPPSSARCSS

SEQ ID NO: 1608 - protein, 219 aa, Homo sapiens
  SITE (205): Xaa equals any of the naturally occurring L-amino acids
  SITE (212): Xaa equals any of the naturally occurring L-amino acids
YFSVGQRQCWISFTLTAQNSICCLPCNLRTNTHLLYNPRRGDIKLTQLAMLLAEISSVAHQKDGSFCPIVMCGDFNSVPGSPLYSFIKEGKLNYEGLPIGKVSGQEQSSRGQRILSIPIWPPNLGISQNCVYEVQQVPKVEKTDSDLTQTQLKQTEVLVTAEKLSSNLQHHFSLSSVYSHYFPDTGIPEVTTCHSRSAITVDYIXLLCRKGXCCWAPRS

SEQ ID NO: 1609 - protein, 267 aa, Homo sapiens
MLIAVGIHLLLLMFEVLVCDRVERGTHFWLLVFMPLFFVSPVSVAACVWGFRHDRSLELEILCSVNILQFIFIALKLDRIIHWPWLVVFVPLWILMSFLCLVVLYYIVWSLLFLRSLDVVAEQRRTHVTMAISWITIVVPLLTFEVLLVHRLDGHNTFSYVSIFVPLWLSLLTLMATTFRRKGGNHWWFGIRRDFCQFLLEIFPFLREYGNISYDLHHEDSEDAEETSVPEAPKIAPIFGKKARVVITQSPGKYVPPPPKLNIDMPD

SEQ ID NO: 1610 - protein, 123 aa, Homo sapiens
  SITE (92): Xaa equals any of the naturally occurring L-amino acids
  SITE (93): Xaa equals any of the naturally occurring L-amino acids
  SITE (108): Xaa equals any of the naturally occurring L-amino acids
  SITE (117): Xaa equals any of the naturally occurring L-amino acids
  SITE (122): Xaa equals any of the naturally occurring L-amino acids
MITTAGKVVVTILLGSSGMMLPSLTSSVYFFVFLGLCTWWSWCRTFDPLLFSCLCVLLAIFTAGHLIGLYLYQFQFFQEAVPPNDYYASFGXXEEFFYSTGTELIIPXRLLQAHHNXTYKQXY

SEQ ID NO: 1611 - protein, 52 aa, Homo sapiens
  SITE (37): Xaa equals any of the naturally occurring L-amino acids
PGLRKNRPSVPRRSSPGRISGLSSVAWNPDHSISVFXLAELTSRAQLAVGVS

SEQ ID NO: 1612 - protein, 125 aa, Homo sapiens
MFRRLASVASKLKEFIGNMITTAGKVVVTILLGSSGMMLPSLTSSVYFFVFLGLCTWWSWCRTFDPLLFSCLCVLLAIFTAGHLIGLYLYQFQFFQEAVPPNDYYASFGQSEEFFYSTGTELIIP

SEQ ID NO: 1613 - protein, 107 aa, Homo sapiens
MITTAGKVVVTILLGSSGMMLPSLTSSVYFFVFLGLCTWWSWCRTFDPLLFSCLCVLLAIFTAGHLIGLYLYQFQFFQEAVPPNDYYASFGQSEEFFYSTGTELIIP

SEQ ID NO: 1614 - protein, 115 aa, Homo sapiens
MAVAVLLCGCIVATVSFFWEESLTQHVAGLLFLMTGIFCTISLCTYAASISYDLNRLPKLIYSLPADVEHGYSWSIFCAWCSLGFIVAAGGLCIAYPFISRTKIAQLKSGRDSTV

SEQ ID NO: 1615 - protein, 182 aa, Homo sapiens
  SITE (88): Xaa equals any of the naturally occurring L-amino acids
  SITE (119): Xaa equals any of the naturally occurring L-amino acids
  SITE (120): Xaa equals any of the naturally occurring L-amino acids
  SITE (149): Xaa equals any of the naturally occurring L-amino acids
  SITE (151): Xaa equals any of the naturally occurring L-amino acids
  SITE (154): Xaa equals any of the naturally occurring L-amino acids
MVIYVTLALWPQIIQKKANGNCFWHFGLLLKLGFLLLFICFLAYSQGAFEKIFSLWPLSKCFELKGNVYEWWFRWRLDRYVVFHGMLXAFIYLALQKRQILSEGKGEPLFSNKISNFLXXISVVSFLTYSIWASSCKNKAECNELHPSXSXVQXLAFILIRNIPGYARQFTVHFLLGLEKFH

SEQ ID NO: 1616 - protein, 83 aa, Homo sapiens
  SITE (17): Xaa equals any of the naturally occurring L-amino acids
  SITE (18): Xaa equals any of the naturally occurring L-amino acids
IWAIDVFAFCLIFFYKXXVRGIHLFICCTDLIMILMFERLHLFAFTICGVKYIFCSQYMKIWSNLNSKQTFCGCLFLYWQSIN

SEQ ID NO: 1617 - protein, 182 aa, Homo sapiens
  SITE (119): Xaa equals any of the naturally occurring L-amino acids
  SITE (120): Xaa equals any of the naturally occurring L-amino acids
  SITE (149): Xaa equals any of the naturally occurring L-amino acids
  SITE (151): Xaa equals any of the naturally occurring L-amino acids
  SITE (154): Xaa equals any of the naturally occurring L-amino acids
MVIYVTLALWPQIIQKKANGNCFWHFGLLLKLGFLLLFICFLAYSQGAFEKIFSLWPLSKCFELKGNVYEWWFRWRLDRYVVFHGMLFAFIYLALQKRQILSEGKGEPLFSNKISNFLXXISVVSFLTYSIWASSCKNKAECNELHPSXSXVQXLAFILIRNIPGYARQFTVHFLLGLEKFH

SEQ ID NO: 1618 - protein, 95 aa, Homo sapiens
MRSQHITWCLLFSSPLATLPAALPLGACAAVFTVIGSEKQSECSLLRESRAKYHGCTHGQISSSLKQHPRWMYSHQEDLKVWSLVEKKQKQCMGD

SEQ ID NO: 1619 - protein, 95 aa, Homo sapiens; identical to SEQ ID NO: 1618

SEQ ID NO: 1620 - protein, 706 aa, Homo sapiens
MLHALQHPCIVALIGISIHPLCFALELAPLSSLNTVLSENARDSSFIPLGHMLTQKIAYQIASGLAYLHKKNIIFCDLKSDNILVWSLDVKEHINIKLSDYGISRQSFHEGALGVEGTPGYQAPEIRPRIVYDEKVDMFSYGMVLYELLSGQRPALGHHQLQIAKKLSKGIRPVLGQPEEVQFRRLQALMMECWDTKPEKRPLALSVVSQMKDPTFATFMYELCCGKQTAFFSSQGQEYTVVFWDGKEESRNYTVVNTEKGLMEVQRMCCPGMKVSCQLQVQRSLWTATEDQKIYIYTLKGMCPLNTPQQALDTPAVVTCFLAVPVIKKNSYLVLAGLADGLVAVFPVVRGTPKDSCSYLCSHTANRSKFSIADEDARQNPYPVKAMEVVNSGSEVWYSNGPGLLVIDCASLEICRRLEPYMAPSMVTSVVCSSEGRGEEVVWCLDDKANSLVMYHSTTYQLCARYFCGVPSPLRDMFPVRPLDTEPPAASHTANPKVPEGDSIADVSIMYSEELGTQILIHQESLTDYCSMSSYSSSPPRQAARSPSSLPSSPASSSSVPFSTDCEDSDMLHTPGAASDRSEHDLTPMDGETFSQHLQAVKILAVRDLIWVPRRGGDVIVIGLEKDSEAQRGRVIAVLKARELTPHGVLVDAAVVAKDTVVCTFENENTEWCLAVWRGWGAREFDIFYQSYEELGRLEACTRKRR

SEQ ID NO: 1621 - protein, 706 aa, Homo sapiens [sequence omitted]

SEQ ID NO: 1622 - protein, 196 aa, Homo sapiens
  SITE (171): Xaa equals any of the naturally occurring L-amino acids
  SITE (175): Xaa equals any of the naturally occurring L-amino acids
  SITE (177): Xaa equals any of the naturally occurring L-amino acids
  SITE (181): Xaa equals any of the naturally occurring L-amino acids
  SITE (185): Xaa equals any of the naturally occurring L-amino acids
  SITE (188): Xaa equals any of the naturally occurring L-amino acids
  SITE (189): Xaa equals any of the naturally occurring L-amino acids
  SITE (193): Xaa equals any of the naturally occurring L-amino acids
MSLLVDGDMNLSIIMTISSTLLALVLMPLCLWIYSWAWINTPIVQLLPLGTVTLTLCSTLIPIGLGVFIRYKYSRVADYIVKVSLWSLLVTLVVLFIMTGTMLGPELLASIPAAVYVIAIFMPLAGYASGYGLATLFHLPPNCKRTVCLETGSQNVQLCTAILKLAFHRIXRKHXHXSFAXCTFXVCXXGDFXFNL

SEQ ID NO: 1623 - protein, 69 aa, Homo sapiens [sequence omitted]

SEQ ID NO: 1624 - protein, 199 aa, Homo sapiens
FSGVCFAGIAGSMATLLHDAVMNPAEVVKQRLQMYNSQHRSAISCIRTVWRTEGLGAFYRSYTTQLTMNIPFQSIHFITYEFLQEQVNPHRTYNPQSHIISGGLAGALAAAATTPLDVCKTLLNTQENVALSLANISGRLSGMANAFRTVYQLNGLAGYFKGIQARVIYQMPSTAISWSVYEFFKYFLTKRQLENRAPY

SEQ ID NO: 1625 - protein, 69 aa, Homo sapiens [sequence omitted]

SEQ ID NO: 1626 - protein, 91 aa, Homo sapiens
  SITE (84): Xaa equals any of the naturally occurring L-amino acids
MARVLQLEPQTSACLLSLLCPALQEPGPASGTESAHFLRAHSRCGPGLPPPHVSSPQPTPPGPEAKVRGCMGARWWLGRAPGVXGVFRDTT

SEQ ID NO: 1627 - protein, 137 aa, Homo sapiens
  SITE (15): Xaa equals any of the naturally occurring L-amino acids
  SITE (39): Xaa equals any of the naturally occurring L-amino acids
AHCHISRSHCPTLRXKDTCGGWEPTSALGSSTLSHVPHXLLERRDLWRREAEARKQSQPDPAMPPGHTRMPENQRLETLTKLLQSQSQLLRELVLLPAGADSLRAQSHRAELDRKLVQVEEAIKIFSRPKVFVKMDD

SEQ ID NO: 1628 - protein, 95 aa, Homo sapiens
MAWAPACVQAQGLSCLCLFPDPSSCREWCCPLGMYLQVETRTSSRLHLKRAPGIRSWSLLVGKALHVPPQNPRTGSLTFKKDENETKYFLFFLLP

SEQ ID NO: 1629 - protein, 189 aa, Homo sapiens
  SITE (81): Xaa equals any of the naturally occurring L-amino acids
  SITE (163): Xaa equals any of the naturally occurring L-amino acids
VQLSVPAGMLHSLCVQLFITAGSLCATHSQCLSKADGARPSILYLTCPLHSPIKNGPQIRVEEADVSSSETALPRSRRDGXAKPGCETGCCMWLQALNIVTWRLPQHIVRSKPQEPEQQNSCHPQKPAPGTAVQIGRRSSQQWLLRTPLTQQRSPDACRSPEXALSALDMAGDTQVWPSQSLFAKLKVK

SEQ ID NO: 1630 - protein, 95 aa, Homo sapiens; identical to SEQ ID NO: 1628

SEQ ID NO: 1631 - protein, 303 aa, Homo sapiens
  SITE (224): Xaa equals any of the naturally occurring L-amino acids
  SITE (245): Xaa equals any of the naturally occurring L-amino acids
  SITE (250): Xaa equals any of the naturally occurring L-amino acids
  SITE (252): Xaa equals any of the naturally occurring L-amino acids
  SITE (255): Xaa equals any of the naturally occurring L-amino acids
  SITE (256): Xaa equals any of the naturally occurring L-amino acids
  SITE (257): Xaa equals any of the naturally occurring L-amino acids
  SITE (287): Xaa equals any of the naturally occurring L-amino acids
  SITE (301): Xaa equals any of the naturally occurring L-amino acids
MAAASAGATRLLLLLLMAVAAPSRARGSGCRAGTGARGAGAEGREGEACGTVGLLLEHSFEIDDSANFRKRGSLLWNQQDGTLSLSQRQLSEEERGRLRDVAALNGLYRVRIPRRPGALDGLEAGGYVSSFVPACSLVESHLSDQLTLHVDVAGNVVGVSVVTHPGGCRGHEVEDVDLELFNTSVQLQPPTTAPGPETAAFIERLEMEQAQKAKNPQEQKSFFXKYWMYIIPVVLFLMMSGAPDXGGQGXGXGGXXXGVVAGEGPSLSAFPSCKTQGGFPFCLEFPXCSSSPSPKKGFCLXPL

SEQ ID NO: 1632 - protein, 173 aa, Homo sapiens
  SITE (99): Xaa equals any of the naturally occurring L-amino acids
  SITE (118): Xaa equals any of the naturally occurring L-amino acids
  SITE (141): Xaa equals any of the naturally occurring L-amino acids
  SITE (164): Xaa equals any of the naturally occurring L-amino acids
  SITE (170): Xaa equals any of the naturally occurring L-amino acids
  SITE (172): Xaa equals any of the naturally occurring L-amino acids
  SITE (173): Xaa equals any of the naturally occurring L-amino acids
MAAASAGATRLLLLLLMAVAAPSRARGSGCRAGTGARGAGAEGREGEACGTVGLLLEHSFEIDDSANFRKRGSLLWNQQDGTLSLSQRQLSEEERGRLXDVAALNGLYRVRIPRRPGXLDGLEAGGYVSSFVPACSLVESXLSDQLTLHVDVAGNVVGRVGGDXPWGCRXHXX

SEQ ID NO: 1633 - protein, 158 aa, Homo sapiens
MAAASAGATRLLLLLLMAVAAPSRARGSGCRAGTGARGAGAEGREGEACGTVGLLLEHSFEIDDSANFRKRGSLLWNQQDGTLSLSQRQLSEEERGRLRDVAASYLDCGATRACGPLLCATLPVSLFKNIDDTLKCVNVLKSYSFQQPKATVVLARRS

SEQ ID NO: 1634 - protein, 158 aa, Homo sapiens; identical to SEQ ID NO: 1633

SEQ ID NO: 1635 - protein, 115 aa, Homo sapiens
MRSRKIPQQSRFFTPLFFLNLPILVVPLPSTDTSCSDFQYQVFKTSYPPSSVPPSLQSHKHWCSQIKISPKQCQRDPLSSFQARDMFSFQVLEKTGSMFTWNFSRGGAISFCIKL

SEQ ID NO: 1636 - protein, 115 aa, Homo sapiens; identical to SEQ ID NO: 1635

SEQ ID NO: 1637 - protein, 80 aa, Homo sapiens
MALGSMYLVLTLIVAKVLRGAEPCCGPLKNRVLRPCPLPVHCPLPIPSPAEGIPWVAYLPIRWFISCCPGHCIQIPMCTS

SEQ ID NO: 1638 - protein, 80 aa, Homo sapiens; identical to SEQ ID NO: 1637

SEQ ID NO: 1639 - protein, 81 aa, Homo sapiens
MRTNQSLCSFLLWSVPFHQAACPQAKDHPLEPSMHPEGTQLQSCSTMLGPRQLSSEKQPLLPPRSHLKSSPMLRACKGLTS

SEQ ID NO: 1640 - protein, 81 aa, Homo sapiens; identical to SEQ ID NO: 1639

SEQ ID NO: 1641 - protein, 53 aa, Homo sapiens
  SITE (52): Xaa equals any of the naturally occurring L-amino acids
MVFLSHLFGTKRLFLLLALIWASWHFSYMPADAWVDPGIPDRYLQAYLSIVXP

SEQ ID NO: 1642 - protein, 61 aa, Homo sapiens
MHVVHWSRLFLLKPPYSVHATFIPTGFLARFRTPGILDSCFFHSWPLLLSYFLSPQSPLLK

SEQ ID NO: 1643 - protein, 86 aa, Homo sapiens
MLTAVKMFRLSAVTLCAFSLTLHSGVQLCEQLVLRIALFQNCRAEDGFGLRVCWRRLMRSFCRSAKFWGSNDLRTWGSRFLWKDCT

SEQ ID NO: 1644 - protein, 86 aa, Homo sapiens; identical to SEQ ID NO: 1643

SEQ ID NO: 1645 - protein, 122 aa, Homo sapiens
  SITE (116): Xaa equals any of the naturally occurring L-amino acids
MGLLAFLKTQFVLHLLVGFVFVVSGLVINFVQLCTLALWPVSKQLYRRLNCRLAYSLWSQLVMLLEWWSCTECTLFTDQATVERFGKEHAIIILNHNFEIDFLCGWTMCERFGMLXSSKGPR

SEQ ID NO: 1646 - protein, 121 aa, Homo sapiens
GDFLWKTSRVDEKEAAQWLHKLYQEKDALQEIYNQKGMFPGEQFKPARRPWTLLNFLSWATILLSPLFSFVLGVFASGSPLLILTFLGFVGAASFGVRRLIGVTEIEKGSSYGNQEFKKKE

SEQ ID NO: 1647 - protein, 376 aa, Homo sapiens
  SITE (30): Xaa equals any of the naturally occurring L-amino acids
MGLLAFLKTQFVLHLLVGFVFVVSGLVINXVQLCTLALWPVSKQLYRRLNCRLAYSLWSQLVMLLEWWSCTECTLFTDQATVERFGKEHAVIILNHNFEIDFLCGWTMCERFGVLGSSKVLAKKELLYVPLIGWTWYFLEIVFCKRKWEEDRDTVVEGLRRLSDYPEYMWFLLYCEGTRFTETKHRVSMEVAAAKGLPVLKYHLLPRTKGFTTAVKCLRGTVAAVYDVTLNFRGNKNPSLLGILYGKKYEADMCVRRFPLEDIPLDEKEAAQWLHKLYQEKDALQEIYNQKGMFPGEQFKPARRPWTLLNFLSWATILLSPLFSFVLGVFASGSPLLILTFLGFVGAASFGVRRLIGVTEIEKGSSYGNQEFKKKE

SEQ ID NO: 1648 - protein, 164 aa, Homo sapiens
  SITE (76): Xaa equals any of the naturally occurring L-amino acids
  SITE (112): Xaa equals any of the naturally occurring L-amino acids
  SITE (146): Xaa equals any of the naturally occurring L-amino acids
MRTLVELGPWAGDFGPDLLLTLLFLLFLAHGVTLDGASANPTVSLQEFLMAEQSLPGTLLKLAAQGLGMQAACTLXRLCWAWELSDLHLLQSLMAQSCSSALRTSVPHGALXEAACTFCFHLTLLHLRHSPPAYSGPAVALLVTVXAYTAGPYVCFFNPALAAL

SEQ ID NO: 1649 - protein, 186 aa, Homo sapiens
MRTLVELGPWAGDFGPDLLLTLLFLLFLAHGVTLDGASANPTVSLQEFLMAEQSLPGTLLKLAAQGLGMQAACTLMRLCWAWELSDLHLLQSLMAQSCSSALRTSVPHGALLEAACTFCFHLTLLHLRHSPPAYSGPAVALLVTVTAYTAGPFTSAFFNPALAASVTFACSDTPYWSTCRCTGWAL

SEQ ID NO: 1650 - protein, 206 aa, Homo sapiens
  SITE (200): Xaa equals any of the naturally occurring L-amino acids
MVRLAAELLLLLGLLLLTLHITVLRGSGAADGPDAAAGNASQAQLQNNLNVGSDTTSETSFSLSKEAPREHLDHQAAHQPFPRPRFRQETGHPSLQRDFPRSFLLDLPNFPDLSKADINGQNPNIQVTIEVVDGPDSEADKDQHPENKPSWSVPSPDWRAWWQRSLSLARANSGDQDYQYDSTSDDSNFLNPPRGWDHTXPGHRDF

SEQ ID NO: 1651 - protein, 107 aa, Homo sapiens
  SITE (52): Xaa equals any of the naturally occurring L-amino acids
HFSKGKQQNKWEKDNGPHFTYFNTILTIFSSTNISPINKYKRGGGSIWGILXFYVLRKQKKLHYFCKVFIESRIIVHQAIVNMTWSYGVELRKNKVGSYSIFYFAKF

SEQ ID NO: 1652 - protein, 464 aa, Homo sapiens
MVRLAAELLLLLGLLLLTLHITVLRGSGAADGPDAAAGNASQAQLQNNLNVGSDTTSETSFSLSKEAPREHLDHQAAHQPFPRPRFRQETGHPSLQRDFPRSFLLDLPNFPDLSKADINGQNPNIQVTIEVVDGPDSEADKDQHPENKPSWSVPSPDWRAWWQRSLSLARANSGDQDYKYDSTSDDSNFLNPPRGWDHTAPGHRTFETKDQPEYDSTDGEGDWSLWSVCSVTCGNGNQKRTRSCGYACTATESRTCDRPNCPGIEDTFRTAATEVSLLAGSEEFNATKLFEVDTDSCERWMSCKSEFLKKYMHKVMNDLPSCPCSYPTEVAYSTADIFDRIKRKDFRWKDASGPKEKLEIYKPTARYCIRSMLSLESTTLAAQHCCYGDNMQLITRGKGAGTPNLISTEFSAELHYKVDVLPWIICKGDWSRYNEARPPNNGQKCTESPSDEDYIKQFQEAREY

SEQ ID NO: 1653 - protein, 158 aa, Homo sapiens [sequence omitted]

SEQ ID NO: 1654 - protein, 106 aa, Homo sapiens
  SITE (26): Xaa equals any of the naturally occurring L-amino acids
PTFSDQYLAPHPYSPQPPPYHELPHXHGQSQRVLCGCYVAHCGARLGRALLVCDWVSWPSCACSYSAWAQPTSCCHTGDCGHCDSHQQCLVPPPSLRGRQGTFDYF

SEQ ID NO: 1655 - protein, 158 aa, Homo sapiens [sequence omitted]

SEQ ID NO: 1656 - protein, 66 aa, Homo sapiens
MHRPEAMLLLLTLALLGGPTWAGKMYGPGGGKYFSTTEDYDHEITGLRVSVGLLLVKRFLEGVIYE

SEQ ID NO: 1657 - protein, 178 aa, Homo sapiens
MHRPEAMLLLLTLALLGGPTWAGKMYGPGGGKYFSTTEDYDHEITGLRVSVGLLLVKSVQVKLGDSWDVKLGALGGNTQEVTLQPGEYITKVFVAFQAFLRGMVMYTSKDRYFYFGKLDGQISSAYPSQEGQVLVGIYGQYQLLGIKSIGFEWNYPLEEPTTEPPVNLTYSANSPVGR

SEQ ID NO: 1658 - protein, 112 aa, Homo sapiens
  SITE (12): Xaa equals any of the naturally occurring L-amino acids
  SITE (52): Xaa equals any of the naturally occurring L-amino acids
  SITE (64): Xaa equals any of the naturally occurring L-amino acids
  SITE (67): Xaa equals any of the naturally occurring L-amino acids
  SITE (68): Xaa equals any of the naturally occurring L-amino acids
MTFCLFVLFCLXWSLALLPRVECSGAISAHCNLHLPGSGGFSCLSLLSSWDXRHAPPCPDNFCXFSXXGVSLCWQAGLEHLTRGPPASASQSTGITGVSHPAWPRMTFKRSN

SEQ ID NO: 1659 - protein, 122 aa, Homo sapiens
MTTASSLISPFFPLPPPAHFSQCRMTFCLFVLFCLRWSLALLPRVECSGAISAHCNLHLPGSSGFSCLSLLSSWDYRHAPPCPDNFCIFSRDGVSLCWPGWSRTPDLVVHPPRPPKALGLQA

SEQ ID NO: 1660 - protein, 65 aa, Homo sapiens
  SITE (24): Xaa equals any of the naturally occurring L-amino acids
MCKGLKNPEGLLLLLLLLLFTDTXNSHCLPPYLSCFLHERQPELQSVCISAAYVLAPLQNPVSSL

SEQ ID NO: 1661 - protein, 299 aa, Homo sapiens
  SITE (172): Xaa equals any of the naturally occurring L-amino acids
  SITE (174): Xaa equals any of the naturally occurring L-amino acids
GGEEEGEEGAEISGLGAGRRSAPIAVGLGFLGVGGRGGSDMEANGSQGTSGSANDSQHDPGKMFIGGLSWQTSPDSLRDYFSKFGEIRECMVMRDPTTKRSRGFGFVTFADPASVDKVLGQPHHELDSKTIDPKVAFPRRAQPKMVTRTKKIFVGGLSANTVVEDVKQYFEXFXKVEDAMLMFDKTTNRHRGFGFVTFENEDVVEKVCEIHFHEINNKMVECKKAQPKEVMFPPGTRGRARGLPYTMDAFMLGMGMLGESGQDRRSPWTGRAMEASTPNWVTYQWGKLLHLSKPQFPCL

SEQ ID NO: 1662 - protein, 97 aa, Homo sapiens [sequence omitted]

SEQ ID NO: 1663 - protein, 86 aa, Homo sapiens
  SITE (71): Xaa equals any of the naturally occurring L-amino acids
MLAAAPLHEQKQMIGTCYLVLKRWSDWMVLSFLPLLLSCDFEGSVSTPLSMMSTPSWLARSRACCWRLTTXSCCSCWSLQNPSMPR

SEQ ID NO: 1664 - protein, 86 aa, Homo sapiens; identical to SEQ ID NO: 1663
  SITE (71): Xaa equals any of the naturally occurring L-amino acids

SEQ ID NO: 1665 - protein, 49 aa, Homo sapiens
MKHSFLSSDLIWCVLSLLCLGVWFRETWTTLFGRTGLPRNQQCPRRKGL

SEQ ID NO: 1666 - protein, 49 aa, Homo sapiens; identical to SEQ ID NO: 1665

SEQ ID NO: 1667 - protein, 142 aa, Homo sapiens
  SITE (69): Xaa equals any of the naturally occurring L-amino acids
  SITE (76): Xaa equals any of the naturally occurring L-amino acids
  SITE (90): Xaa equals any of the naturally occurring L-amino acids
  SITE (108): Xaa equals any of the naturally occurring L-amino acids
MYVTLVFRVKGSRLVKPSLCLALLCPAFLVGVVRVAEYRNHWSDVLAGFLTGAAIATFLVTCVVHNFQXRPPSGRXLSPQSAYPRLPGPXFPHLHNGGDHPCPAGCRXGCESSAWMQPGGSHRAAFTGLALPWAGGRPHPKR

SEQ ID NO: 1668 - protein, 110 aa, Homo sapiens
MYVTLVFRVKGSRLVKPSLCLALLCPAFLVGVVRVAEYRNHWSDVLAGFLTGAAIATFLVTCVVHNFQSRPPSGRRLSPQSAYPRLPGPQFPHLHNGGDHPCPAGCQERL

SEQ ID NO: 1669 - protein, 159 aa, Homo sapiens [sequence omitted]

SEQ ID NO: 1670 - protein, 110 aa, Homo sapiens
MRWPCPTSKPAPPPVLWSHLCQHRWGLTPASTLLCWLLLFNLGTCLSFSHLKQNNNNSNTSKISFDPASLCWVIISLSFPPFPSKHLKRVVYTQHSPFPHYPLTPQPAAI

SEQ ID NO: 1671 - protein, 382 aa, Homo sapiens
GPERGRYYPKSHKNVDLNDVLVPKPFSQFWQPLLRGLHSQNFTQALLERMLSELPALGISGIRPTYILRWTVELIVANTKTGRNARRFSAGQWEARRGWRLFNCSASLDWPRMVESCLGSPCWASPQLLRIIFKAMGQGLPDEEQEKLLRICSIYTQSGENSLVQEGSEASPIGKSPYTLDSLYWSVKPASSSFGSEAKAQQQEEQGSVNDVKEEEKEEKEVLPDQVEEEEENDDQEEEEEDEDDEDDEEEDRMEVGPFSTGQESPTAENARLLAQKRGALQGSAWQVSSEDVRWDTFPLGRMPGQTEDPAELMLENYDTMYLLDQPVLEQRLEPSTCKTDTLGLSCGVGSGNCSNSSSSNFEGLLWSQGQLHGLKTGLQLF

SEQ ID NO: 1672 - protein, 110 aa, Homo sapiens; identical to SEQ ID NO: 1670

SEQ ID NO: 1673 - protein, 156 aa, Homo sapiens
  SITE (92): Xaa equals any of the naturally occurring L-amino acids
  SITE (114): Xaa equals any of the naturally occurring L-amino acids
  SITE (122): Xaa equals any of the naturally occurring L-amino acids
  SITE (134): Xaa equals any of the naturally occurring L-amino acids
MLQGHSSVFQALLGTFFTWGMTAAGAALVFVFSSGQRRILDGSLGFAAGVMLAASYWSLLAPAVEMATSSGGFGAFAFFPVAVGFTLGAAFXYLADLLMPHLGAAEDPQTALAXNFGSTLMXKKSDPEGPALLXPESELFIRIGRLASFSSSLLQH

SEQ ID NO: 1674 - protein, 167 aa, Homo sapiens
  SITE (140): Xaa equals any of the naturally occurring L-amino acids
MLQGHSSVFQALLGTFFTWGMTAAGAALVFVFSSGQRRILDGSLGFAAGVMLAASYWSLLAPAVEMATSSGGFGAFAFFPVAVGFTLGAAFVYLADLLMPHLGAAEDPQTALALNFGSTLMKKKSDPEGHALLFPERIHXIDKSENGEAYQRKKAAATGLPEGPAVP

SEQ ID NO: 1675 - protein, 204 aa, Homo sapiens
MFQFLSQGFYCGVGLFTRFLKLLGALLLLALALFLGFLQLGWRFLVGLGDRLGWRDKATWLFSWLDSPALQRCLTLLRDSRPWQRLVRIVQWGWLELPWVKQNINRQGNAPVASGRYCQPEEEVARLLTMAGVPEDELNPFHVLGVEATASDVELKKAYRQLAVMVHPDKNHHPRAEEAFKVFASSLGTLSAMLKKRKGVWRLK

SEQ ID NO: 1676 - protein, 412 aa, Homo sapiens
MGVWTGRLGGWAQVMFQFLSQGFYCGVGLFTRFLKLLGALLLLALALFLGFLQLGWRFLVGLGDRLGWRDKATWLFSWLDSPALQRCLTLLRDSRPWQRLVRIVQWGWLELPWVKQNINRQGNAPVASGRYCQPEEEVARLLTMAGVPEDELNPFHVLGVEATASDVELKKAYRQLAVMVHPDKNHHPRAEEAFKVLRAAWDIVSNAEKRKEYEMKRMAENELSRSVNEFLSKLQDDLKEAMNTMMCSRCQGKHRRFEMDREPKSARYCAECNRLHPAEEGDFWAESSMLGLKITYFALMDGKVYDITQWAGCQRVGISPDTHRVPYHISFGSRIPGTRGRQRATPDAPPADLQDFLSRIFQVPPGQMPNGNFFAAPQPAPGAAAASKPNSTVPKGEAKPKRRKKVRRPFQR

SEQ ID NO: 1677 - protein, 122 aa, Homo sapiens
  SITE (119): Xaa equals any of the naturally occurring L-amino acids
MALFRCVWSVLSALGKSGSDLCAGCGSRLRSPFSFAYVPRCFSSTANSYPKKPLTSYVRFSKEQLPIFKAQNPDAKNSELIRKIAQLWRELPDSEKKIYEDAYRADLAGHTKKEINRIXEPG

SEQ ID NO: 1678 - protein, 246 aa, Homo sapiens
MALFRCVWSVLSALGKSGSDLCAGCGSRLRSPFSFAYVPRCFSSTANSYPKKPLTSYVRFSKEQLPIFKAQNPDAKNSELIRKIAQLWRELPDSEKKIYEDAYRADWQAYKEEINRIQEQLTPSQIVSLEKEIQQKRLKKKALIKKRELTMLGKPKRPRSAYNIFIAERFQETKDGTSQVKLKTINENWKNLSSSQKQVYIQLANDDKIRYYNEMKSWEEQMMEVGRKDLLRRTVKHQRKVDPEEY

SEQ ID NO: 1679 - protein, 495 aa, Homo sapiens
  SITE (330): Xaa equals any of the naturally occurring L-amino acids
  SITE (333): Xaa equals any of the naturally occurring L-amino acids
MSMLVVFLLLWGVTWGPVTEAAIFYETQPSLWAESESLLKPLANVTLTCQARLETPDFQLFKNGVAQEPVHLDSPAIKHQFLLTGDTQGRYRCRSGLSTGWTQLSKLLELTGPKSLPAPWLSMAPVSWITPGLKTTAVCRGVLRGVTFLLRREGDHEFLEVPEAQEDVEATFPVHQPGNYSCSYRTDGEGALSEPSATVTIEELAAPPPPVLMHHGESSQVLHPGNKVTLTCVAPLSGVDFQLRRGEKELLVPRSSTSPDRIFFHLNAVALGDGGHYTCRYRLHDNQNGWSGDSAPVELILSDETLPAPEFSPEPESGRALRLRCLAPLXGAXFALVREDRGGRRVHRFQSPAGTEALFELHNISVADSANYSCVYVDLKPPFGGSAPSERLELHVDGPPPRPQLRATWSGAVLAGRDAVLRCEGPIPDVTFELLREGETKAVKTVRTPGAAANLELIFVGPQHAGNYRCRYRSWVPHTFESELSDPVELLVAES

SEQ ID NO: 1680 - protein, 495 aa, Homo sapiens
MSMLVVFLLLWGVTWGPVTEAAIFYETQPSLWAESESLLKPLANVTLTCQARLETPDFQLFKNGVAQEPVHLDSPAIKHQFLLTGDTQGRYRCRSGLSTGWTQLSKLLELTGPKSLPAPWLSMAPVSWITPGLKTTAVCRGVLRGVTFLLRREGDHEFLEVPEGQEDVEATFPVHQPGNYSCSYRTDGEGALSEPSATVTIEELAAPPPPVLMHHGESSQVLHPGNKVTLTCVAPLSGVDFQLRRGEKELLVPRSSTSPDRIFFHLNAVALGDGGHYTCRYRLHDNQNGWSGDSAPVELILSDETLPAPEFSPEPESGRALRLRCLAPLEGARFALVREDRGGRRVHRFQSPAGTEALFELHNISVADSANYSCVYVDLKPPFGGSAPSERLELHVDGPPPRPQLRATWSGAVLAGRDAVLRCEGPIPDVTFELLREGETKAVKTVRTPGAAANLELIFVGPQHAGNYRCRYRSWVPHTFESELSDPVELLVAES

SEQ ID NO: 1681 - protein, 153 aa, Homo sapiens
MLKDFSNLLLVVLCDYVLGEAEYLLLREPGHVALSNDTVYVDFQYFDGANGTLRNVSVLLLEANTNQTVTTKYLLTNQSQGTLKFECFYFKEAGDYWFTMTPEATDNSTPFPWWEKSAFLKVEWPVFHVDLNRSAKAAEGTFQVGLFTSQPLC

SEQ ID NO: 1682 - protein, 78 aa, Homo sapiens
SSPTSPKDNYQRVSSLSPSQCRKDKCQSFPTHPEFAFYDNTSFGLTEAEQRMLDLPGYFGSNEEDETTSTLSVEKLVI

SEQ ID NO: 1683 - protein, 490 aa, Homo sapiens
MGKNKYCFDFGISSRSHFSAKEECMLIQRNTAFQPSSPSPLQPQGPVKSNNIVTVTGISLCLFIIIATVLITLWRRFGRPAKCSTPARHNSIHSPSFRKNSDEENICELSEQRGSFSDGGDGPTGSPGDTGIPLTYRRSGPVPPEDDASGSESFQSNAQKIIPPLFSYRLAQQQLKEMKKKGLTETTKVYHVSQSPLTDTAIDAAPSAPLDLESPEEAAANKFRIKSPFPEQPAVSAGERPPSRLDLNVTQASCAISPSQTLIRKSQARHVGSRGGPSERSHARNAHFRRTASFHEARQARPFRERSMSTLTPRQAPAYSSRTRTCEQAEDRFRPQSRGAHLFPEKLEHFQEASGTRGPLNPLPKSYTLGQPLRKPDLGDHQAGLVAGIERTEPHRARRGPSPSHKSVSRKQSSPISPKDNYQRVSSLSPSQCRKDKCQSFPTHPEFAFYDNTSFGLTEAEQRMLDLPGYFGSNEEDETTSTLSVEKLVI

SEQ ID NO: 1684 - protein, 178 aa, Homo sapiens
  SITE (123): Xaa equals any of the naturally occurring L-amino acids
  SITE (175): Xaa equals any of the naturally occurring L-amino acids
MAMVPGATLRRLLSVVLPTASQPQLLALLDSATERHVDHAAESDGGAEQADVGRRRKHQSWWQALDGKLRGDLISRGLEKMLWARKRKQSILKKTCLPLRERMIFSGKGSWPHLSLEPIGELXPVPIVGAETIDLLNTGEKLFIFRNPKEPEISLHVPPRKKKNFLNAKKAMRAXGMD

SEQ ID NO: 1685 - protein, 200 aa, Homo sapiens [sequence omitted]

SEQ ID NO: 1686 - protein, 419 aa, Homo sapiens
MSCAGRAGPARLAALALLTCSLWPARADNASQEYYTALINVTVQEPGRGAPLTFRIDRGRYGLDSPKAEVRGQVLAPLPLHGVADHLGCDPQTRFFVPPNIKQWIALLQRGNCTFKEKISRAAFHNAVAVVIYNNKSKEEPVTMTHPGTGDIIAVMITELRGKDILSYLEKNISVQMTIAVGTRMPPKNFSRGSLVFVSISFIVLMIISSAWLIFYFIQKIRYTNARDRNQRRLGDAAKKAISKLTTRTVKKGDKETDPDFDHCAVCIESYKQNDVVRILPCKHVFHKSCVDPWLSEHCTCPMCKLNILKALGIVPNLPCTDNVAFDMERLTRTQAVNRRSALGDLAGDNSLGLEPLRTSGISPLPQDGELTPRTGEINIAVTKEWFIIASFGLLSALTLCYMIIRATASLNANEVEWF

SEQ ID NO: 1687 - protein, 419 aa, Homo sapiens; identical to SEQ ID NO: 1686

SEQ ID NO: 1688 - protein, 143 aa, Homo sapiens
  SITE (120): Xaa equals any of the naturally occurring L-amino acids
  SITE (142): Xaa equals any of the naturally occurring L-amino acids
MAFSKLLEQAGGVGLFQTLQVLTFILPCLMIPSQMLLENFSAAIPGHRCWTHMLDNGSAVSTNMTPKALLTISIPPGPNQGPHQCRRFRQPQWQLLDPNATATSWSEADTEPCVDGWVYXRRSSPPPSWPSGTWCAAPRLEXP

SEQ ID NO: 1689 - protein, 515 aa, Homo sapiens
  SITE (145): Xaa equals any of the naturally occurring L-amino acids
  SITE (151): Xaa equals any of the naturally occurring L-amino acids
  SITE (168): Xaa equals any of the naturally occurring L-amino acids
MAFSKLLEQAGGVGLFQTLQVLTFILPCLMIPSQMLLENFSAAIPGHRCWTHMLDNGSAVSTNMTPKALLTISIPPGPNQGPHQCRRFRQPQWQLLDPNATATSWSEADTEPCVDGWVYDRSVFTSTIVAKWDLVCSSQGLKPLXQSIFMXGILVGSFIWGLLSYRFXRKPMLSWCCLQLAVAGTSTIFAPTFVIYCGLRFVAAFGMAGIFLSSLTLMVEWTTTSRRAVTMTVVGCAFSAGQAALGGLAFALRDWRTLQLAASVPFFAISLISWWLPESARWLIIKGKPDQALQELRKVARINGHKEAKNLTIEVLMSSVKEEVASAKEPRSVLDLFCVPVLRWRSCAMLVVNFSLLISYYGLVFDLQSLGRDIFLLQALFGAVDFLGRATTALLLSFLGRRTIQAGSQAMGGLAILANMLVPQVRMTADGILHTVGRLGAMMGPLILMSRQALPLLPPLLYGVISIASSLVVLFFLPETQGLPLPDTIQDLESQKSTAAQGNRQEAVTVESTSL

SEQ ID NO: 1690 - protein, 88 aa, Homo sapiens
MDWWFLAIAMALLWLTTSRKQCCSTWALLNYMALMILIGENPDLLVNLDSLQEPVCVILVKGLLFQRIAANLQPLVLHHHTIQMMNKK

SEQ ID NO: 1691 - protein, 81 aa, Homo sapiens
MDWWFLAIAMALLWLTTSRKQCCSTWALLNYMALMILIGENPDLLVNLDSLQEPVCVILVKGLLFQRIAANLQPLQRCQGS

SEQ ID NO: 1692 - protein, 462 aa, Homo sapiens
  SITE (148): Xaa equals any of the naturally occurring L-amino acids
  SITE (149): Xaa equals any of the naturally occurring L-amino acids
  SITE (204): Xaa equals any of the naturally occurring L-amino acids
  SITE (292): Xaa equals any of the naturally occurring L-amino acids
  SITE (303): Xaa equals any of the naturally occurring L-amino acids
MVDYLQKAVLLNLGTIELYGSNDPYRREPRSPRKSRQPSGAGLCDISEGTVVPEDRCKSPTSAKMSRKLSLPTDLKPDLDVKDNSFSRSRSSSVTSIDKESREAISALHFCETFTRKTDSSPSPCLWVGTTLGTVLVIALNLPPGGEXXLLQPVIVSPSGTILRLKGAILRMAFLDTTGCLIPPAYEPWREHNVPEEKDEKEKXKKRRPVSVSPSSSQEISENQYAVICSEKQAKVISLPTQNCAYKQNITETSFVLRGDIVALSNSICLACFCANGHIMTFSLPSLRPLLXVYYLPLTNMRXARTFCFTNNGQALYLVSPTEIQRLTYSQETCENLQEMLGELFTPVETPEAPNRGFFKGLFGGGAQSLDREELFGESSSGKASRSLAQHIPGPGGIEGVKGAASGVVGELARARLALDERGQKLGDLEERTAAMLSSAESFSKHAHEIMLKYKDKKWYQF

SEQ ID NO: 1693 - protein, 112 aa, Homo sapiens
MLISGWARWLMPLVPALWEAEAGESGVQDQPGQCGETLSLLKIKKKKKKKWLISESYSGLNSVIQPKLITLCYLWEPHLKSKDPDTCLILWQGSNESNKMLVKVRTGSILNT

SEQ ID NO: 1694 - protein, 82 aa, Homo sapiens
  SITE (45): Xaa equals any of the naturally occurring L-amino acids
  SITE (76): Xaa equals any of the naturally occurring L-amino acids
MGLQSRLSQPCHCRHLGLGNSVVGTVLFLVGCLVASLPPPTRCQXHCSPQPPAPVVTIVSKHCQMVQGKGKIAPVXKSTAVK

SEQ ID NO: 1695 - protein, 82 aa, Homo sapiens; identical to SEQ ID NO: 1510

SEQ ID NO: 1696 - protein, 193 aa, Homo sapiens
MQLGTLLTFFHELVQTALPSGSCVDTLLKDLCKMYTTLTALVRYYLQVCQSSGGIPKNMEKLVKLSGSHLTPLCYSFISYVQNKSKSLNYTGEKKEKPAAVATAMARVLRETKPIPNLIFAIEQYEKFLIHLSKKSKVNLMQHMKLSTSRDFKIKGNILDMVLREDGEDENEEGTASEHGGQNKEPAKKKRKK

SEQ ID NO: 1697 - protein, 193 aa, Homo sapiens; identical to SEQ ID NO: 1696

SEQ ID NO: 1698 - protein, 22 aa, Homo sapiens
MVCDSLPRHDFHPARLHPTRFL

SEQ ID NO: 1699 - protein, 271 aa, Homo sapiens
MLSEKHLISVCADNNHVRTWSVTRFRGMISTQPGSTPLASFKILALESADGHGGCSAGNDIGPYGERDDQQVFIQKVVPSASQLFVRLSSTGQRVCSVRSVDGSPTTAFTVLECEGSRRLGSRPRRYLLTGQANGSLAMWDLTTAMDGLGQAPAGGLTEQELMEQLEHCELAPPAPSAPSWGCLPSPSPRISLTSLHSASSNTSLSGHRGSPSPPQAEARRRGGGSFVERCQELVRSGPDLRRPPTPAPWPSSGLGTPLTPPKMKLNETSF

SEQ ID NO: 1700 - protein, 148 aa, Homo sapiens
  SITE (71): Xaa equals any of the naturally occurring L-amino acids
  SITE (125): Xaa equals any of the naturally occurring L-amino acids
MRSSCVLLTALVALAAYYVYIPLPGSVSDPWKLMLLDATFRGAQQVSNLIHYLGLSHHLLALNFIIVSFGXKSAWSSAQVKVTDTDFDGVEVRVFEGPPKPEEPLKRSVVYIHGGGWALASAKIXYYDELCTAMAEELNAALFPLNTG

SEQ ID NO: 1701 - protein, 148 aa, Homo sapiens; identical to SEQ ID NO: 1700
  SITE (71): Xaa equals any of the naturally occurring L-amino acids
  SITE (125): Xaa equals any of the naturally occurring L-amino acids

SEQ ID NO: 1702 - protein, 408 aa, Homo sapiens
  SITE (223): Xaa equals any of the naturally occurring L-amino acids
MRSSCVLLTALVALAAYYVYIPLPGSVSDPWKLMLLDATFRGAQQVSNLIHYLGLSHHLLALNFIIVSFGQKSAWSSAQVKVTDTDFDGVEVRVFEGPPKPEEPLKRSVVYIHGGGWALASAKISYYDELCTAMAEELNAVIVSIEYRLVPKVYFPEQIHDVVRATKYFLKPEVLQKYMVDPGRICISGDSAGGNLAAALGQQFTQDASLKNKLKLQALIYPXLQALDFNTPSYQQNVNTPILPRYVMVKYWVDYFKGNYDFVQAMIVNNHTSLDVEEAAAVRARLNWTSLLPASFTKNYKPVVQTTGNARIVQELPQLLDARSAPLIADQAVLQLLPKTYILTCEHDVLRDDGIMYAKRLESAGVEVTLDHFEDGFHGCMIFTSWPTNFSVGIRTRNSYIKWLDQNL

SEQ ID NO: 1703 - protein, 88 aa, Homo sapiens
MMFCFVLFLRWSLALLPGWLAVARSRLTAISCFLGLSDSPALASRVAGTTGAHHHARLVFCILVETVSPCWPGWSRSPDFVICLPQTP

SEQ ID NO: 1704 - protein, 88 aa, Homo sapiens; identical to SEQ ID NO: 1703

SEQ ID NO: 1705 - protein, 94 aa, Homo sapiens
MIGYRLCLHLLSLLGFQPLPMGLCRVREQKFKQFSGLSHFSFRISPVTFPSYVHADSQPTRDKWVPWDLSSFTCMCAEASKSARNVWTALQTPL

SEQ ID NO: 1706 - protein, 61 aa, Homo sapiens
SQHFGRPRWKDCLKPGVRDQPGQHSKTPSLCKKKGIILYFLLIRFICVSNLHLQFDFFSDL

SEQ ID NO: 1707 - protein, 101 aa, Homo sapiens
  SITE (69): Xaa equals any of the naturally occurring L-amino acids
VIFFFFFSCRERVCVAQAGLNFMASSYSASASRSAGNIGMSHHTQPLCLLSFSIIINLFMFIHSPVDEXLGCFQFWAVTNKAPGNICVQKKKKKKKKKKKK

SEQ ID NO: 1708 - protein, 123 aa, Homo sapiens
MAWPNVFQRGSLLSQFSHHHVVVFLLTFFSYSLLHASRKTFSNVKVSISEQWTPSAFNTSVELPLEIWSSNHLFPSAEKATLFLGTLDTIFLFSYAVGLFISGIVGDRLNLRWVLLLACALLH

SEQ ID NO: 1709 - protein, 160 aa, Homo sapiens
  SITE (7): Xaa equals any of the naturally occurring L-amino acids
LPNCYLXDTIEGTPAGTGPEFAAASTSLKECRAVIIASRGQPVWPALLDVHAVDDFVVSCNLAHRRATIPEEDCSKLLPSFPDHGDPLTVFSPSNVFDLPSERLVLILQQVLLLRGIPDPQLPRHISGGNVESAGRILGHHHLMGVLCVDVSKGWVVDVP

SEQ ID NO: 1710 - protein, 21 aa, Homo sapiens
HHHLMGVLCVDVSKGWVVDVP

SEQ ID NO: 1711 - protein, 185 aa, Homo sapiens
  SITE (163): Xaa equals any of the naturally occurring L-amino acids
MAWPNVFQRGSLLSQFSHHHVVVFLLTFFSYSLLHASRKTFSNVKVSISEQWTPSAFNTSVELPLEIWSSNHLFPSAEKATLFLGTLDTIFLFSYAVGLFISGIVGDRLNLRWVLSFGMCSSALVVFVFGALTEWLRFYNKWLYCCLWIVNGLLQSTGWPCVXAVMGNWFGKAGYATSFLSNFSV

SEQ ID NO: 1712 - protein, 102 aa, Homo sapiens
  SITE (13): Xaa equals any of the naturally occurring L-amino acids
  SITE (14): Xaa equals any of the naturally occurring L-amino acids
MRVSCSRSCCSLXXISLSLRLVASCLPCCLCLSAAPRMQEEPGHLRPSRARPLEGPSWDSPSLAPPASAQRPLPPPVSRILPATSGRAGRWCGWAPCPKTAA

SEQ ID NO: 1713 - protein, 53 aa, Homo sapiens
  SITE (31): Xaa equals any of the naturally occurring L-amino acids
VWARWPMLSIPAAQGGRLLEPKHSRLAWETXQDPVSTKTFKMSQVAGCGGSCL

SEQ ID NO: 1714 - protein, 173 aa, Homo sapiens [sequence omitted]

SEQ ID NO: 1715 - protein, 102 aa, Homo sapiens
MRVSCSRSCCSLPPISLSLRLVASCLPCCLCLSAAPRMQEEPGHLRPSRARPLEGPSWDSPSLAPPASAQRPLPPPVSRILPATSGRAGRWCGWAPCPKTAA

SEQ ID NO: 1716 - protein, 180 aa, Homo sapiens
  SITE (140): Xaa equals any of the naturally occurring L-amino acids
MPAPARSCQRAALSLWASGLGWLSAQPTVAFRGSSWDWEPPQGQADGVRFVLGLVLPMLGGGGAPRTDQPCFSCNAVTLSLNTWIHVWPGLAGSRSPARVGSHGPALEPPSGPGAAEAASEGLPRPAFHRWGAQPSKAAXTPPRPVCQGAGHNPAGPRTGLQASPCAPAGRPCSREEVLG

SEQ ID NO: 1717 - protein, 131 aa, Homo sapiens
  SITE (24): Xaa equals any of the naturally occurring L-amino acids
  SITE (122): Xaa equals any of the naturally occurring L-amino acids
  SITE (123): Xaa equals any of the naturally occurring L-amino acids
EAKGTAMQRPWGRTAPGMREEQSXERRAGRAGPCGPQGGLGHLPRGSGAPGCVSRWERQGRICGDLTRAGEAETRVQPPPPKAGPSQRRGRAGQEVSGCLLGLVWFCFVLFIVVKYKIYRLXXKKKKKGRP

SEQ ID NO: 1718 - protein, 180 aa, Homo sapiens [sequence omitted]

SEQ ID NO: 1719 - protein, 177 aa, Homo sapiens
  SITE (120): Xaa equals any of the naturally occurring L-amino acids
  SITE (124): Xaa equals any of the naturally occurring L-amino acids
  SITE (126): Xaa equals any of the naturally occurring L-amino acids
  SITE (148): Xaa equals any of the naturally occurring L-amino acids
  SITE (171): Xaa equals any of the naturally occurring L-amino acids
  SITE (172): Xaa equals any of the naturally occurring L-amino acids
MVGKIKRLKKSAFVVLILLITAKLLVLPLLCREMVELLDKGDSVVNHTSLSNYAFLYGVFPVAPGVAIFATQFNMEVEIITSGMVISTFVSAPIMYVSAWLLTFPTMDPKPLAYAIQNVXFDIXIXSLISLIWSLAILLLSKKYKQLXHMLTTNLLIAQSIVCAGMMIWNXXKEKNF

SEQ ID NO: 1720 - protein, 447 aa, Homo sapiens
TTTKFAAASTFHPASKSNIKKVWMAEQKISYDKKKQEELMQQYLKEQESYDNRLLMGDERVKNGLNFMYEAPPGAKKENKEKEETEGETEYKFEWQKGAPREKYAKDDMNIRDQPFGIQVRNVRCIKCHKWGHVNTDRECPLFGLSGINASSVPTDGSGPSMHPSELIAEMRNSGFALKRNVLGRNLTANDPSQEYVASEGEEDPEVEFLKSLTTKQKQKLLRKLDRLEKKKKKKDRKKKKFQKSRSKHKKHKSSSSSSSSSSSSSSTETSESSSESESNNKEKKIQRKKRKKNKCSGHNNSDSEEKDKSKKRKLHEELSSSHHNREKAKEKPRFLKHESSREDSKWSHSDSDKKSRTHKHSPEKRGSERKEGSSRSHGREERSRRSRSRSPGSYKQRETRKRAQRNPGEEQSRRNDSRSHGTDLYRGEKMYREHPGGTHTKVTQRE

SEQ ID NO: 1721 - protein, 177 aa, Homo sapiens
  SITE (98): Xaa equals any of the naturally occurring L-amino acids
  SITE (134): Xaa equals any of the naturally occurring L-amino acids
  SITE (148): Xaa equals any of the naturally occurring L-amino acids
  SITE (171): Xaa equals any of the naturally occurring L-amino acids
  SITE (172): Xaa equals any of the naturally occurring L-amino acids
MVGKIKRLKKSAFVVLILLITAKLLVLPLLCREMVELLDKGDSVVNHTSLSNYAFLYGVFPVAPGVAIFATQFNMEVEIITSGMVISTFVSAPIMYVXAWLLTFPTMDPKPLAYAIQNVSFDISIVSLISLIWXLAILLLSKKYKQLXHMLTTNLLIAQSIVCAGMMIWNXXKEKNF

SEQ ID NO: 1722 - protein, 227 aa, Homo sapiens
  SITE (171): Xaa equals any of the naturally occurring L-amino acids
MVGKIKRLKKSAFVVLILLITAKLLVLPLLCREMVELLDKGDSVVNHTSLSNYAFLYGVFPVAPGVAIFATQFNMEVEIITSGMVISTFVSAPIMYVSAWLLTFPTMDPKPLAYAIQNVSFDISIVSLISLIWSLAILLLSKKYKQLPHMLTTNLLIAQSIVCAGMMIWNXVKEKNFVGQILVFVLLYSSLYSTYLWTGLLAISLFLLKKRERVQIPVGIIIISGWG

SEQ ID NO: 1723 - protein, 227 aa, Homo sapiens
MVGKIKRLKKSAFVVLILLITAKLLVLPLLCREMVELLDKGDSVVNHTSLSNYAFLYGVFPVAPGVAIFATQFNMEVEIITSGMVISTFVSAPIMYVSAWLLTFPTMDPKPLAYAIQNVSFDISIVSLISLIWSLAILLLSKKYKQLPHMLTTNLLIAQSIVCAGMMIWNFVKEKNFVGQILVFVLLYSSLYSTYLWTGLLAISLFLLKKRERVQIPVGIIIISGWG

SEQ ID NO: 1724 - protein, 87 aa, Homo sapiens
  SITE (61): Xaa equals any of the naturally occurring L-amino acids
  SITE (82): Xaa equals any of the naturally occurring L-amino acids
MQWRALVLGLVLLRLGLHGVLWLVFGLGPSMGFYQRFPLSFGFQRLRSPDGPASPTFGARXPAWGGIRAVVACNRRGTGQRXTRAKL

SEQ ID NO: 1725 - protein, 146 aa, Homo sapiens
  SITE (115): Xaa equals any of the naturally occurring L-amino acids
  SITE (123): Xaa equals any of the naturally occurring L-amino acids
  SITE (140): Xaa equals any of the naturally occurring L-amino acids
MQWRALVLGLVLLRLGLHGVLWLVFGLGPSMGFYQRFPLSFGFQRLRSPDGPASPTSGPVGRPGGVSGPSWLQPPGTGAAQSPRKAPRRPGPGMCGPANWGYVLGRPGRGPDEYXEAATAAPXLRNLRARCPELARGMVXFWATTL

SEQ ID NO: 1726 - protein, 405 aa, Homo sapiens
MQWRALVLGLVLLRLGLHGVLWLVFGLGPSMGFYQRFPLSFGFQRLRSPDGPASPTSGPVGRPGGVSGPSWLQPPGTGAAQSPRKAPRRPGPGMCGPANWGYVLGGRGRGPDEYEKRYSGAFPPQLRAQMRDLARGMFVFGYDNYMAHAFPQDELNPIHCRGRGPDRGDPSNLNINDVLGNYSLTLVDALDTLAIMGNSSEFQKAVKLVINTVSFDKDSTVQVFEATIRVLGSLLSAHRIITDSKQPFGDMTIKDYDNELLYMAHDLAVRLLPAFENTKTGIPYPRVNLKTGVPPDTNNETCTAGAGSLLVEFGILSRLLGDSTFEWVARRAVKALWNLRSNDTGLLGVAPFLAIGTAHCLVPFSFHLLWALPPFYSSTQLTTQQELCQLYLISLCDPLQRGCMV

SEQ ID NO: 1727 - protein, 120 aa, Homo sapiens
  SITE (116): Xaa equals any of the naturally occurring L-amino acids
  SITE (120): Xaa equals any of the naturally occurring L-amino acids
MILWLDWALFLLVFPGQFFCWFCLGSLMRLQVAAGSASVWGSAGMTWPLSACGPLSSMMVSGFQASKPQCTSIYPAFACIALAHVSLAKTDHVAKLRVSVGRVYTSAWILKGMIHXGPLX

SEQ ID NO: 1728 - protein, 53 aa, Homo sapiens
  SITE (11): Xaa equals any of the naturally occurring L-amino acids
KYSYCSHLHFXMNESALFCSNFHWKPVGSERLWPPLIIYDLKPACNREPLQSL

SEQ ID NO: 1729 - protein, 120 aa, Homo sapiens
MILWLDWALFLLVFPGQFFCWFCLGSLMRLQVAAGSASVWGSAGMTWPLSACGPLSSMMVSGFQASKPQCTSIYPAFACIALAHVSLAKTDHVAKLRVSVGRVYTSAWILKGMIHWGPLL

SEQ ID NO: 1730 - protein, 485 aa, Homo sapiens [sequence omitted]

SEQ ID NO: 1731 - protein, 485 aa, Homo sapiens [sequence omitted]

SEQ ID NO: 1732 - protein, 485 aa, Homo sapiens [sequence omitted]

SEQ ID NO: 1733 - protein, 65 aa, Homo sapiens [sequence omitted]

SEQ ID NO: 1734 - protein, 65 aa, Homo sapiens [sequence omitted]

SEQ ID NO: 1735 - protein, 342 aa, Homo sapiens
  SITE (150): Xaa equals any of the naturally occurring L-amino acids
  SITE (271): Xaa equals any of the naturally occurring L-amino acids
MWTALVLIWIFSLSLSESHAASNDPRNFVPNKMWKGLVKRNASVETVDNKTSEDVTMAAASPVTLTKGTSAAHLNSMEVTTEDTSRTDVSEPATSGGAADGVTSIAPTAVASSTTAASITTAASSMTVASSAPTTAASSTTVASIAPTTXASSMTAASSTPMTLALPAPTSTSTGRTPSTTATGHPSLSTALAQVPKSSALPRTATLATLATRAQTVATTANTSSPMSTRPSPSKHMPSDTAASPVPPMRPQAQGPISQVSVDQPVVNTTXKSTPMPSNTTTEPLTQAVVDKTLLLVVLLLGVTLFITVLVLFALQAYESYKKKDYTQVDYLINGMYADSEM

SEQ ID NO: 1736 - protein, 96 aa, Homo sapiens
  SITE (75): Xaa equals any of the naturally occurring L-amino acids
MTLPTSQCLICLLQALCGIGHGALAWGSNQVLFPGGQQEDGGCQRIPDPSFLSTPCGKQGGHAEQELQQCWGAFXQLPGCVLHFHPGVLHKAHSEW

SEQ ID NO: 1737 - protein, 79 aa, Homo sapiens [sequence omitted]

SEQ ID NO: 1738 - protein, 96 aa, Homo sapiens
MTLPTSQCLICLLQALCGIGHGALAWGSNQVLFPGGQQEDGGCQRIPDPSFLSTPCGKQGGHAEQELQQCWGAFCQLPGCVLHFHPGVLHKAHSEW

SEQ ID NO: 1739 - protein, 162 aa, Homo sapiens
  SITE (134): Xaa equals any of the naturally occurring L-amino acids
  SITE (142): Xaa equals any of the naturally occurring L-amino acids
  SITE (154): Xaa equals any of the naturally occurring L-amino acids
  SITE (161): Xaa equals any of the naturally occurring L-amino acids
MALPRCTWPNYVWRAVMACLVHRGLGAPLTLCMLGCLLQAGHVLSQKLDDVDPLVATNFGKIRGIKKELNNEILGPVIQFLGVPYAAPPTGERRFQPPEPPSPWSDIRNATQFAPVCPQNIIDGRLPEVMLPVXFTNNLDVXSSYVQDQSERLXIFKYICXD

SEQ ID NO: 1740 - protein, 228 aa, Homo sapiens
MALPRCTWPNYVWRAVMACLVHRGLGAPLTLCMLGCLLQAGHVLSQKLDDVDPLVATNFGKIRGIKKELNNEILGPVIQFLGVPYAAPPTGERRFQPPEPPSPWSDIRNATQFAPVCPQNIIDGRLPEVMLPVWFTNNLDVVSSYVQDQSEDCLYLNIYVPTEDDIRDSGGPKPVMVYIHGGSYMEGTGNLYDGSVLASYGNVIVITVNYRLGVLGKKSLSFVFTMNP

SEQ ID NO: 1741 - protein, 94 aa, Homo sapiens
MLPTLTAPTLALLLLPKISCLLTSTHPRTQGSRAHFPRAWRLDPGEFLHPLQDPHSSPLWSLDHRWRWPELTCWLWGHSSCWPRMRRGTREYKG

SEQ ID NO: 1742 - protein, 94 aa, Homo sapiens; identical to SEQ ID NO: 1741

SEQ ID NO: 1743 - protein, 57 aa, Homo sapiens
  SITE (8): Xaa equals any of the naturally occurring L-amino acids
  SITE (9): Xaa equals any of the naturally occurring L-amino acids
MRTDYPRXXRSCLCVSLSPPLVSKGSHRSRWLRTMAVPAGTQVWRQDLQPLGAVLLQ

SEQ ID NO: 1744 - protein, 123 aa, Homo sapiens
MRTDYPRSVLAPAYVSVCLLLLCPREVIAPAGSEPWLCQPAPRCGDKIYNPLEQCCYNDAIVSLSETRQCGPPCTFWPCFELCCLDSFGLTNDFVVKLKVQGVNSQCHSSPISSKCESRRRFP

SEQ ID NO: 1745 - protein, 107 aa, Homo sapiens [sequence omitted]

SEQ ID NO: 1746 - protein, 107 aa, Homo sapiens [sequence omitted]

SEQ ID NO: 1747 - protein, 120 aa, Homo sapiens [sequence omitted]

SEQ ID NO: 1748 - protein, 62 aa, Homo sapiens
  SITE (23): Xaa equals any of the naturally occurring L-amino acids
DVLQITFWWPLVTAVSLQGLNKXLSPIPFHTCVVYYWQASVLRVSNGTDGCQTLWISASPGW

SEQ ID NO: 1749 - protein, 120 aa, Homo sapiens [sequence omitted]

SEQ ID NO: 1750 - protein, 105 aa, Homo sapiens
MDDFLFSVSILSGILCSILAVLKFMLGKVLTSRALITDGFNSLVGGVMGFSILLSAEVFKHDSAVWYLDGSIGVLIGLTIFAYGVKLLIDMVPRVRQTRHYEMFE

SEQ ID NO: 1751 - protein, 186 aa, Homo sapiens
  SITE (138): Xaa equals any of the naturally occurring L-amino acids
  SITE (166): Xaa equals any of the naturally occurring L-amino acids
MLDKIISIFIIFLLVIGTLLLALLLTAKVHQESVHMIEVTSNLINETLANHPEWANWLPEAQVVQRALNSAANNVYQYGREWITHKLHKILGDKVNNTAVIEKQVLELWDRLYHSWFVKNVTHSGRHKGQKLHVSRQXSWLGDILDWQDIVSFVHENIETFLSILXSLWIVMSLNVSLLLPLALHS

SEQ ID NO: 1752 - protein, 224 aa, Homo sapiens
VLSLIIFLTTLFYLLSSSDEYYKPVKWVISLTPLSQPGPSSNIIGQSVEEAIRGVFDASLKMAGFYGLYTWLTHTMFGINIVFIPSALAAILGAVPFLGTYWAAVPAVLDLWLTQGLGCKAILLLIFHLLPTYFVDTAIYSDISGGGHPYLTGLAVAGGAYYLGLEGAIIGPILLCILVVASNIYSAMLVSPTNSVPTPNQTPWPAQPQRTFRDISEDLKSSVG

SEQ ID NO: 1753 - protein, 424 aa, Homo sapiens
  SITE (138): Xaa equals any of the naturally occurring L-amino acids
  SITE (183): Xaa equals any of the naturally occurring L-amino acids
MLDKIISIFIIFLLVIGTLLLALLLTAKVHQESVHMIEVTSNLINETLANHPEWANWLPEAQVVQRALNSAANNVYQYGREWITHKLHKILGDKVNNTAVIEKQVLELWDRLYHSWFVKNVTHSGRHKGQKLHVSRQXSWLGDILDWQDIVSFVHENIETFLSILESLWIVMSRNVSLLFTTXTTLLTILFYSGTALLNFVLSLIIFLTTLFYLLSSSDEYYKPVKWVISLTPLSQPGPSSNIIGQSVEEAIRGVFDASLKMAGFYGLYTWLTHTMFGINIVFIPSALAAILGAVPFLGTYWAAVPAVLDLWLTQGLGCKAILLLIFHLLPTYFVDTAIYSDISGGGHPYLTGLAVAGGAYYLGLEGAIIGPILLCILVVASNIYSAMLVSPTNSVPTPNQTPWPAQPQRTFRDISEDLKSSVG

SEQ ID NO: 1754 - protein, 385 aa, Homo sapiens
MLDKIISIFIIFLLVIGTLLLALLLTAKVHQESVHMIEVTSNLINETLANHPEWANWLPEAQVVQRALNSAANNVYQYGREWITHKLHKILGDKVNNTAVIEKQVLELWDRLYHSWFVKNVTHSGRHKGQKLHVSRQNSWLGDILDWQDIVSFVHENIETFLSILESLWIVMSRNVSLLFTTVTTLLTILFYSGTALLNFVLSLIIFLTTLFYLLSSSDEYYKPVKWVISLTPLSQPGPSSNIIGQSVEEAIRGVFDASLKMAGFYGLYTWLTHTMFGINIVFIPSALAAILGAVPFLGTYWAAVPAVLDLWLTQGLGCKAILLMIFHLLPTYFVDTAIYSDISGGGHPYLTGLAVAGGSILPRPGRSNHRSYSSLHTCGCFQYL

SEQ ID NO: 1755 - protein, 293 aa, Homo sapiens [sequence omitted]

SEQ ID NO: 1756 - protein, 566 aa, Homo sapiens
MQVVSHGDERPAWLMSETLRHLHTHFGADYDWFFIMQDDTYVQAPRLAALAGHLSINQDLYLGRAEEFIGAGEQARYCHGGFGYLLSRSLLLRLRPHLDGCRGDILSARPDEWLGRCLIDSLGVGCVSQHQAQIRNLTVLTPEGEAGLSWPVGLPAPFTPHSRFEVLGWDYFTEQHTFSCADGAPKCPLQGASRADVGDALETALEQLNRRYQPRLRFQKQRLLNGYRRFDPARGMEYTLDPGSTHASERGHRRALARRVSLLRPLSRVEILPMPYVTEATRVQLVLPLLVAEAAAAPAFLEAFAANVLEPREHALLTLLLVYGPREGGRGAPDPFLGVKAAAAELERRYPGTRLAWLAVRAEAPSQVRLMDVVSKKHPVDTLFFLTTVWTRPGPEVLNRCRMNAISGWQAFFPVHFQEFNPALSPQRSPPGPPGAGPDPPSPPGADPSRGAPIAGRFDRQASAEGCFYNADYLAARARLAGELAGQEEEEALEGLEVMDVFLRFSGLHLFRAVEPGLVQKFSLRDCSPRLSEELYHRCRLSNLEGLGGRAQLAMALFEQEQANST

SEQ ID NO: 1757 - protein, 249 aa, Homo sapiens
  SITE (221): Xaa equals any of the naturally occurring L-amino acids
  SITE (241): Xaa equals any of the naturally occurring L-amino acids
  SITE (246): Xaa equals any of the naturally occurring L-amino acids
MEFSWLETRWARPFYLAFVFCLALGLLQAIKLYLRRQRLLRDLRPFPAPPTHWFLGHQKFIQDDNMEKLEEIIEKYPRAFPFWIGPFQAFFCIYDPDYAKTLLSRTDPKSQYLQKFSPPLLGKGLAALDGPKWFQHRRLLTPGFHFNILKAYIEVMAHSVKMMLDKWEKICSTQDTSVEVYEHINSMSLDIIMKCAFSKETNCQTNSTHDPYAKAILNSAXSYFTVVQLLYHSDIFFKFSXQGYRXPEL

SEQ ID NO: 1758 - protein, 96 aa, Homo sapiens
  SITE (74): Xaa equals any of the naturally occurring L-amino acids
  SITE (88): Xaa equals any of the naturally occurring L-amino acids
  SITE (89): Xaa equals any of the naturally occurring L-amino acids
  SITE (91): Xaa equals any of the naturally occurring L-amino acids
AQGHPWSVRTQLPRIPRPSPMTLGPQILICHSGSAAGSRNCIGQEFAMIELKVTIALILLHFRVTPDPTRPLTXPNHFILKPKNGMYXXLXKLSEC

SEQ ID NO: 1759 - protein, 249 aa, Homo sapiens
  SITE (242): Xaa equals any of the naturally occurring L-amino acids
  SITE (247): Xaa equals any of the naturally occurring L-amino acids
  SITE (248): Xaa equals any of the naturally occurring L-amino acids
MEFSWLETRWARPFYLAFVFCLALGLLQAIKLYLRRQRLLRDLRPFPAPPTHWFLGHQKFIQDDNMEKLEEIIEKYPRAFPFWIGPFQAFFCIYDPDYAKTLLSRTDPKSQYLQKFSPPLLGKGLAALDGPKWFQHRRLLTPGFHFNILKAYIEVMAHSVKMMLDKWEKICSTQDTSVEVYEHINSMSLDIIMKCAFSKETNCQTNSTHDPYAKAIFELSKIIFHRLYSCCITVTYFSNSAXRVTVXXS

SEQ ID NO: 1760 - protein, 509 aa, Homo sapiens
MEFSWLETRWARPFYLAFVFCLALGLLQAIKLYLRRQRLLRDLRPFPAPPTHWFLGHQKFIQDDNMEKLEEIIEKYPRAFPFWIGPFQAFFCIYDPDYAKTLLSRTDPKSQYLQKFSPPLLGKGLAALDGPKWFQHRRLLTPGFHFNILKAYIEVMAHSVKMMLDKWEKICSTQDTSVEVYEHINSMSLDIIMKCAFSKETNCQTNSTHDPYAKAIFELSKIIFHRLYSLLYHSDIIFKLSPQGYRFQKLSRVLNQYTDTIIQERKKSLQAGVKQDNTPKRKYQDFLDIVLSAKDESGSSFSDIDVHSEVSTFLLAGHDTLAASISWILYCLALNPEHQERCREEVRGILGDGSSITWDQLGEMSYTTMCIKETCRLIPAVPSISRDLSKPLTFPDGCTLPAGITVVLSIWGLHHNPAVWKNPKVFDPLRFSQENSDQRHPYAYLPFSAGSRNCIGQEFAMIELKVTIALILLHFRVTPDPTRPLTFPNHFILKPKNGMYLHLKKLSEC

SEQ ID NO: 1761 - protein, 143 aa, Homo sapiens [sequence omitted]

SEQ ID NO: 1762 - protein, 143 aa, Homo sapiens [sequence omitted]

SEQ ID NO: 1763 - protein, 88 aa, Homo sapiens
MKSLIKTYFLLWTLKKLLPLSTLIPIMLSPLDIFFSDNPHIDCSGHHFVPYLLIGLDTDPQFTCLYLLILTLLVFVFSLTLLSPPSPG

SEQ ID NO: 1764 - protein, 88 aa, Homo sapiens; identical to SEQ ID NO: 1763

SEQ ID NO: 1765 - protein, 231 aa, Homo sapiens
  SITE (146): Xaa equals any of the naturally occurring L-amino acids
  SITE (177): Xaa equals any of the naturally occurring L-amino acids
  SITE (193): Xaa equals any of the naturally occurring L-amino acids
  SITE (199): Xaa equals any of the naturally occurring L-amino acids
  SITE (208): Xaa equals any of the naturally occurring L-amino acids
  SITE (222): Xaa equals any of the naturally occurring L-amino acids
  SITE (231): Xaa equals any of the naturally occurring L-amino acids
MALSSLIVILLVVFALVLHGQNKKYKNCSTGKGISTMEESVTLDNGGFAALELSSRHLNVKSTFSKKNGTRSPPRPSPGGLHYSDEDICNKYNGAVLTESVSLKEKSADASESEATDSDYEDALPKHSFVNHYMSDPTYYNSWKRXAQGPRTCAAQVRGGGGLRGGRAAAPGHHHAXRGRRLHPRWPRRANFXYRLLLXRVSKSAALXQGGTEATFRSLFLXRQFNSNKLX

SEQ ID NO: 1766 - protein, 127 aa, Homo sapiens
EGFFKRLFVTSLQEAGLFLFLFFLREGVFHWCNGLAPPGPGRTSDLPSPGFLRLQDQLGRVKRGEGVEGQVRSQSCPGRPPSLSTSSSREPAAHTLLNAGHPRRLLGFEEQTFFPGLSAFCPNFICF

SEQ ID NO: 1767 - protein, 240 aa, Homo sapiens
  SITE (192): Xaa equals any of the naturally occurring L-amino acids
  SITE (222): Xaa equals any of the naturally occurring L-amino acids
  SITE (235): Xaa equals any of the naturally occurring L-amino acids
MALSSLIVILLVVFALVLHGQNKKYKNCSTGKGISTMEESVTLDNGGFAALELSSRHLNVKSTFSKKNGTRSPPRPSPGGLHYSDEDICNKYNGAVLTESVSLKEKSADASESEATDSDYEDALPKHSFVNHYMSDPTYYNSWKRRAQGPRTCAAQVRGGGGLRGGRAAAPGHHHAERGRRLHPRWPRRANXAHRLLLLRVSKAPRLPQGGTEATFRSLFLXRQSTPITELKFLXKKKKI

SEQ ID NO: 1768 - protein, 96 aa, Homo sapiens
MYLPCQMACSLFVLFVIWLLLKIFQAGPQLMSLAHGSATLVLDGMNIFGPSGYGQECRVACNYFRKCRVPSWARCLMPVIPALWEAEAADQLRLGV

SEQ ID NO: 1769 - protein, 57 aa, Homo sapiens
LYQEKPLMWPRTSLLYVVPRWLLPCSSLPCPLPEIKNSLTEKKKKKKKNKKKKKGRP

SEQ ID NO: 1770 - protein, 104 aa, Homo sapiens [sequence omitted]

SEQ ID NO: 1771 - protein, 206 aa, Homo sapiens
  SITE (176): Xaa equals any of the naturally occurring L-amino acids
  SITE (180): Xaa equals any of the naturally occurring L-amino acids
  SITE (188): Xaa equals any of the naturally occurring L-amino acids
  SITE (189): Xaa equals any of the naturally occurring L-amino acids
  SITE (198): Xaa equals any of the naturally occurring L-amino acids
  SITE (200): Xaa equals any of the naturally occurring L-amino acids
  SITE (206): Xaa equals any of the naturally occurring L-amino acids
MANFKGHALPGSFFLIIGLCWSVKYPLKYFSHTRKNSPLHYYQRLEIVEAAIRTLFSVTVSGIVDMLTYLVSHVPLGVDRLVMAVAVFMEGFLFYYHVHNRPPLDQHIHSLLLYALFGGCVSISLEVIFRDHIVLELFRTSLIILQGTWFWQIGFVLFPPFGTPEWDQKDDANLMXITMXFCCTTWLXXTLWPQLFSXYXLFDSDX

SEQ ID NO: 1772 - protein, 275 aa, Homo sapiens
  SITE (59): Xaa equals any of the naturally occurring L-amino acids
MANFKGHALPGSFFLIIGLCWSVKYPLKYFSHTRKNSPLHYYQRLEIVEAAIRTLFSVXGILAEQFVPDGPHLHLYHENHWIKLMNWQHSTMYLFFAVSGIVDMLTYLVSHVPLGVDRLVMAVAVFMEGFLFYYHVHNRPPLDQHIHSLLLYALFGGCVSISLEVIFRDHIVLELFRTSLIILQGTWFWQIGFVLFPPFGTPEWDQKDDANLMFITMCFCWHYLAALSIVAVNYSLVYCLLTRMKRHGRGEIIGIQKLNSDDTYQTALLSGSDEE

SEQ ID NO: 1773 - protein, 237 aa, Homo sapiens
MANFKGHALPGSFFLIIGLCWSVKYPLKYFSHTRKNSPLHYYQRLEIVEAAIRTLFSVTVSGIVDMLTYLVSHVPLGVDRLVMAVAVFMEGFLFYYHVHNRPPLDQHIHSLLLYALFGGCVSISLEVIFRDHIVLELFRTSLIILQGTWFWQIGFVLFPPFGTPEWDQKDDANLMFITMCFCWHYLAALSIVAVNYSLVYCLLTRMKRHGRGEIIGIQKLNSDDTYQTALLSGSDEE

SEQ ID NO: 1774 - protein, 69 aa, Homo sapiens
MHGMHAAGTGTELTLSGCQPLSTLLLLLLYYCPSFVHSINMCKAAALSLPWAAGQHRGGLSGGAGERMA

SEQ ID NO: 1775 - protein, 69 aa, Homo sapiens; identical to SEQ ID NO: 1774

SEQ ID NO: 1776 - protein, 222 aa, Homo sapiens
MTGQIPRLSKVNLFTLLSLWMELFPAEAQRQKSQKNEEGKHGPLGDNEERTRVSTDKRQVKRTGLVVVKNMKIVGLHCSSEDLHAGQIALIKHGSRLKNCDLYFSRKPCSACLKMIVNAGVNRISYWPADPEISLLTEASSSEDAKLDAKAVERLKSNSRAHVCVLLQPLVCYMVQFVEETSYKCDFIQKITKTLPDANTDFYYECKQERIKEYEMLKKKKK

SEQ ID NO: 1777 - protein, 105 aa, Homo sapiens
  SITE (71): Xaa equals any of the naturally occurring L-amino acids
  SITE (104): Xaa equals any of the naturally occurring L-amino acids
ILKVLKVWSFQLFQIAVCDFSHFYLLRNIHKIIPKMKVHFLFSPRLERGGLGCFMRNVFLDLRWSGLPLLXFPAFPPHHTASLGFLPVSQNYTHDHPNIGSMPXL

SEQ ID NO: 1778 - protein, 489 aa, Homo sapiens
MTGQIPRLSKVNLFTLLSLWMELFPAEAQRQKSQKNEEGKHGPLGDNEERTRVSTDKRQVKRTGLVVVKNMKIVGLHCSSEDLHAGQIALIKHGSRLKNCDLYFSRKPCSACLKMIVNAGVNRISYWPADPEISLLTEASSSEDAKLDAKAVERLKSNSRAHVCVLLQPLVCYMVQFVEETSYKCDFIQKITKTLPDANTDFYYECKQERIKEYEMLFLVSNEEMHKQILMTIGLENLCENPYFSNLRQNMKDLILLLATVASSVPNFKHFGFYRSNPEQINEIHNQSLPQEIARHCMVQARLLAYRTEDHKTGVGAVIWAEGKSRSCDGTGAMYFVGCGYNAFPVGSEYADFPHMDDKQKDREIRKFRYIIHAEQNALTFRCQEIKPEERSMIFVTKCPCDECVPLIKGAGIKQIYAGDVDVGKKKADISYMRFGELEGVSKFTWQLNPSGAYGLEQNEPERRENGVLRPVPQKEEQHQDKKLRLGIH

SEQ ID NO: 1779 - protein, 267 aa, Homo sapiens
MTGQIPRLSKVNLFTLLSLWMELFPAEAQRQKSQKNEEGKHGPLGDNEERTRVSTDKRQVKRTGLVVVKNMKIVGLHCSSEDLHAGQIALIKHGSRLKNCDLYFSRKPCSACLKMIVNAGVNRISYWPADPEISLLTEASSSEDAKLDAKAVERLKSNSRAHVCVLLQPLVCYMVQFVEETSYKCDFIQKITKTLPDANTDFYYECKQERIKEYEMLFLVSNEEMHKQILMTIGLENLCENPYFSNLRQNMKDLILLLATVASMCRL

SEQ ID NO: 1780 - protein, 196 aa, Homo sapiens
  SITE (157): Xaa equals any of the naturally occurring L-amino acids
  SITE (169): Xaa equals any of the naturally occurring L-amino acids
  SITE (171): Xaa equals any of the naturally occurring L-amino acids
  SITE (172): Xaa equals any of the naturally occurring L-amino acids
  SITE (174): Xaa equals any of the naturally occurring L-amino acids
  SITE (179): Xaa equals any of the naturally occurring L-amino acids
  SITE (191): Xaa equals any of the naturally occurring L-amino acids
MYLLEQIDMHGFGGTAATSPLTAVFSLSRSLLAAALLYGFCLGAIKTPWPEQHVPVLFSVFCGLLVALSYHLSRQSSDPTVLWSLIRSKLFPELEERSLETARAEPPDPLPDKMRQSVREVLHSDLVMCVVIAVLTFAISASTVFIALKSVLGFVLXALAGGRGLLHTXPXXTXPQNSXPGSACHSRAETXGIQPG

SEQ ID NO: 1781 - protein, 62 aa, Homo sapiens
  SITE (22): Xaa equals any of the naturally occurring L-amino acids
  SITE (52): Xaa equals any of the naturally occurring L-amino acids
HIISAHVSFTRKLILYSNTWQXAGSRALRVTLADQSPIPPFWVVGSLFCPRXAEASESLSVP

SEQ ID NO: 1782 - protein, 577 aa, Homo sapiens
MYLLEQIDMHGFGGTAATSPLTAVFSLSRSLLAAALLYGFCLGAIKTPWPEQHVPVLFSVFCGLLVALSYHLSRQSSDPTVLWSLIRSKLFPELEERSLETARAEPPDPLPDKMRQSVREVLHSDLVMCVVIAVLTFAISASTVFIALKSVLGFVLYALAGAVGFFTHYLLPQLRKQLPWFCLSQPVLKPLEYSQYEVRGAAQVMWFEKLYAGLQCVEKYLIYPAVVLNALTVDAHTVVSHPDKYCFYCRALLMTVAGLKLLRSAFCCPPQQYLTLAFTVLLFHFDYPRLSQGFLLDYFLMSLLCSKLWDLLYKLRFVLTYIAPWQITWGSAFHAFAQPFAVPHSAMLFVQALLSGLFSTPLNPLLGSAVFIMSYARPLKFWERDYNTKRVDHSNTRLVTQLDRNPGADDNNLNSIFYEHLTRSLQHTLCGDLVLGRWGNYGPGDCFVLASDYLNALVHLIEVGNGLVTFQLRGLEFRGTYCQQREVEAITEGVEEDEGCCCCEPGHLPRVLSFNAAFGQRWLAWEVTASKYVLEGYSISDNNAASMLQVFDLRKILITYYVKVRWAGVAGQQGPCG

SEQ ID NO: 1783 - protein, 177 aa, Homo sapiens
  SITE (145): Xaa equals any of the naturally occurring L-amino acids
  SITE (175): Xaa equals any of the naturally occurring L-amino acids
MKLLLLHPAFQSCLLLTLLGLWRTTPEAHASSPGAPAISAASFLQDLIHRYGEGDSLTLQQLKALLNHLDVGVGRGNVTQHVQGHRNLSTCFSSGDLFTAHNFSEQSRIGSSELQEFCPTILQQLDSRACTSENQENEENEQTEXGRPSAVEVWGYGLLCVTVSPSAPSWGPAWXPS

SEQ ID NO: 1784 - protein, 492 aa, Homo sapiens
MKLLLLHPAFQSCLLLTLLGLWRTTPEAHASSPGAPAISAASFLQDLIHRYGEGDSLTLQQLKALLNHLDVGVGRGNVTQHVQGHRNLSTCFSSGDLFTAHNFSEQSRIGSSELQEFCPTILQQLDSRACTSENQENEENEQTEEGRPSAVEVWGYGLLCVTVISLCSLLGASVVPFMKKTFYKRLLLYFIALAIGTLYSNALFQLIPEAFGFNPLEDYYVSKSAVVFGGFYLFFFTEKILKILLKQKNEHHHGHSHYASESLPSKKDQEEGVMEKLQNGDLDHMIPQHCSSELDGKAPMVDEKVIVGSLSVQDLQASQSACYWLKGVRYSDIGTLAWMITLSDGLHNFIDGLAIGASFTVSVFQGISTSVAILCEEFPHELGDFVILLNAGMSIQQALFFNFLSACCCYLGLAFGILAGSHFSANWIFALAGGMFLYISLADMFPEMNEVCQEDERKGSILIPFIIQNLGLLTGFTIMVVLTMYSGQIQIG

SEQ ID NO: 1785 - protein, 192 aa, Homo sapiens [sequence omitted]

SEQ ID NO: 1786 - protein, 192 aa, Homo sapiens [sequence omitted]

SEQ ID NO: 1787 - protein, 167 aa, Homo sapiens
  SITE (25): Xaa equals any of the naturally occurring L-amino acids
  SITE (150): Xaa equals any of the naturally occurring L-amino acids
MIGPHGYISASDWPLMIFYMVMCIXYILYGILWLTWSACYWKDILRIQFWIAAVIFLGMLEKAVFYSEYQNISNTGLSTQGLLIFAELISAIKRTLARLLVIIVSLGYGIVKPRLGTVMHRVIGLGLLYLIFAAVEGVMRVIGGSNHLAXGLDDIILAVIDSIFVWV

SEQ ID NO: 1788 - protein, 167 aa, Homo sapiens
MIGPHGYISASDWPLMIFYMVMCIVYILYGILWLTWSACYWKDILRIQFWIAAVIFLGMLEKAVFYSEYQNISNTGLSTQGLLIFAELISAIKRTLARLLVIIVSLGYGIVKPRLGTVMHRVIGLGLLYLIFAAVEGVMRVIGGSNHLAVVLDDIILAVIDSIFVWF

SEQ ID NO: 1789 - protein, 81 aa, Homo sapiens
MVHYSWCALFCHFAQGTCLQNSFQSGLVKGCQGSTGGNQGSFQAAKMSPVCYSGHTGWLSRPWAKSISQSADDRSPPSRRT

SEQ ID NO: 1790 - protein, 81 aa, Homo sapiens; identical to SEQ ID NO: 1789

SEQ ID NO: 1791 - protein, 183 aa, Homo sapiens
  SITE (75): Xaa equals any of the naturally occurring L-amino acids
  SITE (125): Xaa equals any of the naturally occurring L-amino acids
MALARPGTPDPQALASVLLLLLWAPALSLLAGTVPSEPPSACASDPCAPGTECQATESGGYTCGPMEPRGCATQXCHHGALCVPQGPDPNGFRCYCVPGFQGPRCELDIDECASRPCHHGATLPXPGRSLRVPLPLGYAAPHLNPLSYVWGIPHLMRQRLPPDGDSKANDSKKLGPQKIYSGK

SEQ ID NO: 1792 - protein, 103 aa, Homo sapiens
MCFLLFGSLCIYYFSLFLVFFFFLFLFCLVFCSCLHCFRYFFTPLDSPRAGSRWSSYAQLLPPPPPPLVEHSCDADTANLQYPHPRRRYLSRPLNPLPENEGI

SEQ ID NO: 1793 - protein, 103 aa, Homo sapiens; identical to SEQ ID NO: 1792

SEQ ID NO: 1794 - protein, 84 aa, Homo sapiens
  SITE (77): Xaa equals any of the naturally occurring L-amino acids
MGHGRRLGRHLLALPVTLSERCLGSPVENETHSRDGTELPDGSREPSSPRRVSESRVTPARTEEPPAEPSLTPDLRXDNSRGSL

SEQ ID NO: 1795 - protein, 84 aa, Homo sapiens
MGHGRRLGRHLLALPVTLSERCLGSPVENETHSRDGTELPDGSREPSSPRRVSESRVTPARTEEPPAEPSLTPDLRLDNSRGSL

SEQ ID NO: 1796 - protein, 116 aa, Homo sapiens
MGSGCPAQPTLSPWGILSRLLGVLAGTSCGVSTPAAAQGGPEIGCRAPHLHLSGHAPLACPCSFLPTSLGGVCVSAPAPALLSWGTLPAIWYWGCPHCLVLGPGPAHSGLALLVCS

SEQ ID NO: 1797 - protein, 171 aa, Homo sapiens
GPWPLCKAQRCAPDQPSGLPWARLGVRVAHWGGGGLARHSTLAGGPSQREPCRLRWSWPLAGCPGSAPPLQGPSRNLLLNGKSYPTKVRLIRGGSLPPVKRRRMNWIDAPDDVFYMATEETRKIRKLLSSSETKRAARRPYKPIALRQSQALPPRPPPPAPVNDEPIVIED

SEQ ID NO: 1798 - protein, 81 aa, Homo sapiens
MLYPRIFTNRGELLPFLFLTVWLWLYKLLFGESPRYPNVIGKTYFFFWTDQISRESRFLERLAFIVSENCLIFLIHAITGQ

SEQ ID NO: 1799 - protein, 81 aa, Homo sapiens; identical to SEQ ID NO: 1798

SEQ ID NO: 1800 - protein, 149 aa, Homo sapiens
  SITE (140): Xaa equals any of the naturally occurring L-amino acids
MVLLWASVLFPAPEDWAELQGAVYRLLVVLLCCLATRKLPHFLHPQRNLLQGSGLDLGAIYQRVEGFASQPEAALRIHATHLGRSPPPRIGSGLKALLQLPASDPTYWATAYFDVLLDKFQVFNIQDKDRISAMQSIFQXTRTLGGEES

SEQ ID NO: 1801 - protein, 149 aa, Homo sapiens [sequence omitted]

SEQ ID NO: 1802 - protein, 140 aa, Homo sapiens
IPLCSIFGALIAVCLIMGLFDGCFISIMAPIAFELVGAQDVSQAIGFLLGFMSIPMTVGPPIAGLLRDKLGSYDVAFYLAGVPPLIGGAVLCFIPWIHSKKQREISKTTGKEKMEKMLENQNSLLSSSSGMFKKESDSII

SEQ ID NO: 1803 - protein, 234 aa, Homo sapiens
PTRPPTRPVRVSVGGLVGEVACACRDCIPETMAEGDNRSTNLLAAETASLEEQLQGWGEVMLMADKVLRWERAWFPPAIMGVVSLVFLIIYYLDPSVLSGVSCFVMFLCLADYLVPILAPRIFGSNKWTTEQQQRFHEICSNLVKTRRRAVGWWKRLFTLKEEKPKMYFMTMIVSLAAVAWVGQQVHNLLLTYLIVTSLLLLPGLNQHGIILKYIGMAKREINKLLKQKEKKNE

SEQ ID NO: 1804 - protein, 155 aa, Homo sapiens [sequence omitted]

SEQ ID NO: 1805 - protein, 202 aa, Homo sapiens
MAEGDNRSTNLLAAETASLEEQLQGWGEVMLMADKVLRWERAWFPPAIMGVVSLVFLIIYYLDPSVLSGVSCFVMFLCLADYLVPILAPRIFGSNKWTTEQQQRFHEICSNLVKTRRRAVGWWKRLFTLKEEKPKMYFMTMIVSLAAVAWVGQQVHNLLLTYLIVTSLLLLPGLNQHGIILKYIGMAKREINKLLKQKKKKK

SEQ ID NO: 1806 - protein, 485 aa, Homo sapiens
ARKPRSQIKNEINIDTLARDEFNLQKMMVMVTASGKLFGIESSSGTILWKQYLPNVKPDSSFKLMVQRTTAHFPHPPQCTLLVKDKESGMSSLYVFNPIFGKWSQVAPPVLKRPILQSLLLPVMDQDYAKVLLLIDDEYKVTAFPATRNVLRQLHELAPSIFFYLVDAEQGRLCGYRLRKDLTTELSWELTIPPEVQRIVKVKGKRSSEHVHSQGRVMGDRSVLYKSLNPNLLAVVTESTDAHHERTFIGIFLIDGVTGRIIHSSVQKKAKGPVHIVHSENWVVYQYWNTKARRNEFTVLELYEGTEQYNATAFSSLDRPQLPQVLQQSYIFPSSISAMEATITERGITSRHLLIGLPSGAILSLPKALLDPRRPEIPTEQSREENLIPYSPDVQIHAERFINYNQTVSRMRGIYTAPSGLESTCLVVAYGLDIYQTRVYPSKQFDVLKDDYDYVLISSVLFGLVFATMITKRLAQVKLLNRAWR

SEQ ID NO: 1807 - protein, 360 aa, Homo sapiens
MAAEWASRFWLWATLLIPAAAVYEDQVGKFDWRQQYVGKVKFASLEFSPGSKKLVVATEKNVIAALNSRTGEILWRHVDKGTAEGAVDAMLLHGQDVITVSNGGRIMRSWETNIGGLNWEITLDSGSFQALGLVGLQESVRYIAVLKKTTLALHHLSSGHLKWVEHLPESDSIHYQMVYSYGSGVVWALGVVPFSHVNIVKFNVEDGEIVQQVRVSTPWLQHLSGACGVVDEAVLVCPDPSSRSLQTLALETEWELRQIPLQSLDLEFGSGFQPRVLPTQPNPVDASRAQFFLHLSPSHYALLQYHYGTLSLLKNFPQTALVSFATTGEKTVAAVMACRNEVQKTSSSEDGSMGELFGEV

SEQ ID NO: 1808 - protein, 75 aa, Homo sapiens
MRGIYTAPSGLESTCLVVAYGLDIYQTRVYPSKQFDVLKDDYDYVLISSVLFGLVFATMITKRLAQVKLLNRAWR

SEQ ID NO: 1809 - protein, 136 aa, Homo sapiens
EFGTRKEEERVAMVPRLAFILFVLARDYNVTSLGQDLNWKYEAKDYRKTGELKNIGECGRSYKFLSRNQDWNTRYSHPNRPAKYSGIDEMCKAQESGLSPSKQLNRLSTLTALKVSQPVKLALFSRSPRREIRVGR

SEQ ID NO: 1810 - protein, 81 aa, Homo sapiens
  SITE (56): Xaa equals any of the naturally occurring L-amino acids
GLHFNIRVDHGMLWAPVLYKDVGQELPVVSTAPSHIALLMEPFTPDVLSRLMGRIXVCKDYVIDQLWSVLKEICQWIIPYG

SEQ ID NO: 1811 - protein, 91 aa, Homo sapiens
  SITE (78): Xaa equals any of the naturally occurring L-amino acids
MHLGLVSLILFCQALEVDISLQGPGIVPGRSEVSLSLQGPRGGGCFPIATGAPFIVLLPLGLYLVFHLCCFFGLFCAXLRLREPGWDHLII

SEQ ID NO: 1812 - protein, 230 aa, Homo sapiens
  SITE (63): Xaa equals any of the naturally occurring L-amino acids
  SITE (66): Xaa equals any of the naturally occurring L-amino acids
MGNSLSVFCSWFCRRSWPCHRQPARLVREAFPAGRAHPAAPAPVPARGIVGRFPLLFNRQRHXGPXFPVRWDGAPMRLCLIPRNTGTPQRVLRPVVWSPPSRKKPVLSPHNSIMFGHLSPVRIPCLRGKFNLQLPSLDDQVIPARLPKTEVSAEEPKEATEVKDQVETQGQEDNKRGPCSNGEAASTSRPLETQGNLTSSWYNPRPLEGNVHLKSLTEKNQTDKAQVHAV

SEQ ID NO: 1813 - protein, 232 aa, Homo sapiens
MGNSLSVFCSWFCRRSWPCHRQPARLVREAFPAGRAHPAAPAPVPARGIVGRFPLLFNRQRHLGPSFPVRWDGAPMRLCLIPRNTGTPQRVLRPVVWSPPSRKKPVLSPHNSIMFGHLSPVRIPCLRGKFNLQLPSLDDQVIPARLPKTEVSAEEPKEATEVKDQVETQGQEDNKRGPCSNGEAASTSRPLETQGNLTSSWYNPRPLEGNVHLKSLTEKNQTDKAQVHAVSC

SEQ ID NO: 1814 - protein, 156 aa, Homo sapiens
MQIQVAGLLQFAVPLFSTAEEDLLAIQLLLNSSESSLHQLTAMVDCRGLHKDYLDALAGICYDGLQGLLYLGLFSFLAALAFSTMICAGPRAWKHFTTRNRDYDDIDDDDPFNPQAWRMAAHSPPRGQLHSFCSYSSGLGSQTSLQPPAQTISNAP

SEQ ID NO: 1815 - protein, 213 aa, Homo sapiens
MQIQVAGLLQFAVPLFSTAEEDLLAIQLLLNSSESSLHQLTAMVDCRGLHKDYLDALAGICYDGLQGLLYLGLFSFLAALAFSTMICAGPRAWKHFTTRNRDYDDIDDDDPFNPQAWRMAAHSPPRGQLHSFCSYSSGLGSQTSLQPPAQTISNAPVSEYMNQAMLFGRNPRYENVPLIGRASPPPTYSPSMRATYLSVADEHLRHYGNQFPA

SEQ ID NO: 1816 - protein, 28 aa, Homo sapiens
  SITE (3): Xaa equals any of the naturally occurring L-amino acids
ECXRKPTPRAEFLQPGGSTSSRAAATAV

SEQ ID NO: 1817 - protein, 75 aa, Homo sapiens
MLNPLRQLFKLMASLFLSVFTLGLPFALFQYYAYTQFCLPGSARPIPEPLVQLAVDKGYRIAEGNEPLGASGMFH

SEQ ID NO: 1818 - protein, 280 aa, Homo sapiens
  SITE (94): Xaa equals any of the naturally occurring L-amino acids
  SITE (95): Xaa equals any of the naturally occurring L-amino acids
MHSQCQGFFSSLTMLNPLRQLFKLMASLFLSVFTLGLPFALFQYYAYTQFCLPGSARPIPEPLVQLAVDKGYRIAEGNEPPWCFWDVPLIYSYXXDVYWNVGFLKYYELKQVPNFLLAAPVAILVAWATWTYVTTHPWLCLTLGLQRSKNNKTLEKPDLGFLSPQVFVYVVHAAVLLLFGGLCMHVQVLTRFLGSSTPIMYWFPAHLLQDQEPLLRSLKTVPWKPLAEDSPPGQKVPRNPIMGLLYHWKTCSPVTRYILGYFLTYWLLGLLLHCNFLPWT

SEQ ID NO: 1819 - protein, 273 aa, Homo sapiens
MLFFCGDLLSRSQIFYYSTGMTVGIVASLLIIIFILSKFMPKKSPIYVILVGGWSFSLYLIQLVFKNLQEIWRCYWQYLLSYVLTVGFMSFAVCYKYGPLENERSINLLTWTLQLMGLCFMYSGIQIPHIALAIIIIALCTKNLEHPIQWLYITCRKVCKGAEKPVPPRLLTEEEYRIQGEVETRKALEELREFCNSPDCSAWKTVSRIQSPKRFADFVEGSSHLTPNEVSVHEQEYGLGSIIAQDEIYEEASSEEEDSYSRCPAITQNNFLT

SEQ ID NO: 1820 - protein, 96 aa, Homo sapiens
  SITE (81): Xaa equals any of the naturally occurring L-amino acids
  SITE (83): Xaa equals any of the naturally occurring L-amino acids
  SITE (84): Xaa equals any of the naturally occurring L-amino acids
  SITE (96): Xaa equals any of the naturally occurring L-amino acids
MKVAVSPAVGPGPWGSGVGGGGTVRLLLILSGCLVYGTAETDVNVVMLQESQVCEKRASQQFCYTNVLIPKWHDIWTRIQXRXXSSRLVRVTQVEX

SEQ ID NO: 1821 - protein, 273 aa, Homo sapiens; identical to SEQ ID NO: 1819

SEQ ID NO: 1822 - protein, 273 aa, Homo sapiens; identical to SEQ ID NO: 1819

SEQ ID NO: 1823 - protein, 105 aa, Homo sapiens
  SITE (69): Xaa equals any of the naturally occurring L-amino acids
MFALAWKVIFSVMLQNPIRYPSVLGIKSSLLSSLVLVMVWGNEKSGPCPTPKSRKGRRSCPAQVGRGEXGSYWDPEFRLSRKSNQGLRRDYLSLYHFNLHFRDTF

SEQ ID NO: 1824 - protein, 105 aa, Homo sapiens [sequence omitted]

SEQ ID NO: 1825 - protein, 94 aa, Homo sapiens
MLLGFLVLIPWGSLILGSSDLDPSSLPLGTRGHGWRWPPLSPVQILYPLAGDPHAAVSCSCCGETELRALLTGSLPMEAFSGLHSIEYSSRTAC

SEQ ID NO: 1826 - protein, 94 aa, Homo sapiens; identical to SEQ ID NO: 1825

SEQ ID NO: 1827 - protein, 261 aa, Homo sapiens
MAVTACQGLGFVVSLIGIAGIIAATCMDQWSTQDLYNNPVTAVFNYQGLWRSCVRESSGFTECRGYFTLLGLPAMLQAVRALMIVGIVLGAIGLLVSIFALKCIRIGSMEDSAKANMTLTSGIMFIVSGLCAIAGVSVFANMLVTNFWMSTANMYTGMGGMVQTVQTRYTFGAALFVGWVAGGLTLIGGVMMCIACRGLAPEETNYKAVSYHASGHSVAYKPGGFKASTGFGSNTKNKKRYDGGARTEDEVQSYPSKHDYV

SEQ ID NO: 1828 - protein, 261 aa, Homo sapiens
  SITE (125): Xaa equals any of the naturally occurring L-amino acids
  SITE (127): Xaa equals any of the naturally occurring L-amino acids
MAVTACQGLGFVVSLIGIAGIIAATCMDQWSTQDLYNNPVTAVFNYQGLWRSCVRESSGFTECRGYFTLLGLPAMLQAVRALMIVGIVLGAIGLLVSIFALKCIRIGSMEDSAKANMTLTSGIMXIXSGLCAIAGVSVFANMLVTNFWMSTANMYTGMGGMVQTVQTRYTFGAALFVGWVAGGLTLIGGVMMCIACRGLAPEETNYKAVSYHASGHSVAYKPGGFKASTGFGSNTKNKKRYDGGARTEDEVQSYPSKHDYV

SEQ ID NO: 1829 - protein, 92 aa, Homo sapiens
MTSLLEGRMVLCVSCLLLPLLLLLKHFNGLMTPYLAHNVYCPIEYISFFPFHEKNIEYISIWFIFDSFKFIYSRLLCISQIYVLYRAYTLPH

SEQ ID NO: 1830 - protein, 92 aa, Homo sapiens; identical to SEQ ID NO: 1829

SEQ ID NO: 1831 - protein, 92 aa, Homo sapiens; identical to SEQ ID NO: 1829

SEQ ID NO: 1832 - protein, 270 aa, Homo sapiens
  SITE (113): Xaa equals any of the naturally occurring L-amino acids
  SITE (118): Xaa equals any of the naturally occurring L-amino acids
  SITE (157): Xaa equals any of the naturally occurring L-amino acids
  SITE (268): Xaa equals any of the naturally occurring L-amino acids
GEEFQPEGSKCTKCSCTGGRTQCVREVCPILSCPQHLSHIPPGQCCPKCLGQRKVFDLPFGSCLFRSDVYDNGSSFLYDNCTACTCRDSTVVCKRKCSHPGGCDQGQEGCCEXCLLRXPPEDIKVCKFGNKIFQDGEMWSSINCTICACVKGRTECXNKQCIPISSCPQGKILNRKGCCPICTEKPGVCTVFGDPHYNTFDGRTFNFQGTCQYVLTKDCSSPASPFQVLVKNDARRTRSFSWTKSVELVLGETGSACSSTSPCAGTAXAS

SEQ ID NO: 1833 - protein, 182 aa, Homo sapiens
  SITE (104): Xaa equals any of the naturally occurring L-amino acids
  SITE (147): Xaa equals any of the naturally occurring L-amino acids
  SITE (151): Xaa equals any of the naturally occurring L-amino acids
  SITE (176): Xaa equals any of the naturally occurring L-amino acids
  SITE (179): Xaa equals any of the naturally occurring L-amino acids
MLWFSGVGALAERYCRRSPGITCCVLLLLNCSGVPMSLASSFLTGSVAKCENEGEVLQIPFITDNPCIMCVCLNKEVTCKREKCPVLSRDCALAIKQRGACCEXCKGCTYEGNTYNSSFKWQSPAEPCVLRQCQEGVVTESGVRCVXHCKXPLEHLGMCCPTCPGCVFEGVQYQEXEEXQPE

SEQ ID NO: 1834 - protein, 47 aa, Homo sapiens
SSSLLIIYVCMMDVTIYMSCVEIKGCLDAMLILLSMRKYLKKLLHNI

SEQ ID NO: 1835 - protein, 445 aa, Homo sapiens
  SITE (147): Xaa equals any of the naturally occurring L-amino acids
  SITE (288): Xaa equals any of the naturally occurring L-amino acids
  SITE (293): Xaa equals any of the naturally occurring L-amino acids
  SITE (332): Xaa equals any of the naturally occurring L-amino acids
  SITE (443): Xaa equals any of the naturally occurring L-amino acids
MLWFSGVGALAERYCRRSPGITCCVLLLLNCSGVPMSLASSFLTGSVAKCENEGEVLQIPFITDNPCIMCVCLNKEVTCKREKCPVLSRDCALAIKQRGACCEQCKGCTYEGNTYNSSFKWQSPAEPCVLRQCQEGVVTESGVRCVXHCKNPLEHLGMCCPTCPGCVFEGVQYQEGEEFQPEGSKCTKCSCTGGRTQCVREVCPILSCPQHLSHIPPGQCCPKCLGQRKVFDLPFGSCLFRSDVYDNGSSFLYDNCTACTCRDSTVVCKRKCSHPGGCDQGQEGCCEXCLLRXPPEDIKVCKFGNKIFQDGEMWSSINCTICACVKGRTECXNKQCIPISSCPQGKILNRKGCCPICTEKPGVCTVFGDPHYNTFDGRTFNFQGTCQYVLTKDCSSPASPFQVLVKNDARRTRSFSWTKSVELVLGETGSACSSTSPCAGTAXAS

SEQ ID NO: 1836 - protein, 370 aa, Homo sapiens
LGGARVRRAVGLSGTGAEAGRAGAMVEKEEAGGGISEEEAAQYDRQIRLWGLEAQKRLRASRVLLVGLKGLGAEIAKNLILAGVKGLTMLDHEQVTPEDPGAQFLIRTGSVGRNRAEASLERAQNLNPMVDVKVDTEDIEKKPESFFTQFDAVCLTCCSRDVIVKVDQICHKNSIKFFTGDVFGYHGYTFANLGEHEFVEEKTKVAKVSQGVEDGPDTKRAKLDSSETTMVKKKVVFCPVKEALEVDWSSEKAKAALKRTTSDYFLLQVLLKFRTDKGRDPSSDTYEEDSELLLQIRNDVLDSLGISPDLLPEDFVRYCFSEMAPVCAVVGGILAQEIVKALSQRDPPHNNFFFFDGMKGNGIVECLGPK

SEQ ID NO: 1837 - protein, 42 aa, Homo sapiens
MVPSVTLILHCPGFSTESHMCGKPLSPRPTRTVGRPVSNIPV

SEQ ID NO: 1838 - protein, 89 aa, Homo sapiens
  SITE (17): Xaa equals any of the naturally occurring L-amino acids
  SITE (47): Xaa equals any of the naturally occurring L-amino acids
VQGVVQALKTDHAFCPXLQGTESIRLRILEFELNQVRSVSQELPPGXPESPQTDGQPPRAWPQLGMPSNPTCFSFLPGYSGLRSSALNF

SEQ ID NO: 1839 - protein, 346 aa, Homo sapiens
MVEKEEAGGGISEEEAAQYDRQIRLWGLEAQKRLRASRVLLVGLKGLGAEIAKNLILAGVKGLTMLDHEQVTPEDPGAQFLIRTGSVGRNRAEASLERAQNLNPMVDVKVDTEDIEKKPESFFTQFDAVCLTCCSRDVIVKVDQICHKNSIKFFTGDVFGYHGYTFANLGEHEFVEEKTKVAKVSQGVEDGPDTKRAKLDSSETTMVKKKVVFCPVKEALEVDWSSEKAKAALKRTTSDYFLLQVLLKFRTDKGRDPSSDTYEEDSELLLQIRNDVLDSLGISPDLLPEDFVRYCFSEMAPVCAVVGGILAQEIVKALSQRDPPHNNFFFFDGMKGNGIVECLGPK

SEQ ID NO: 1840 - protein, 155 aa, Homo sapiens
  SITE (92): Xaa equals any of the naturally occurring L-amino acids
  SITE (105): Xaa equals any of the naturally occurring L-amino acids
  SITE (125): Xaa equals any of the naturally occurring L-amino acids
  SITE (130): Xaa equals any of the naturally occurring L-amino acids
MQHQLHLLICWGKGSKSNTSCLGPVLSCSNMWSLALLVVAGSMGVAYSSVVMYVLLWVPLPLPSHFLPSGAPEAQPTTWAQSPHSVCKCGTXLGPAKPQGPSLPXPPCLIMLLSCRRQLGLAPSXWLPGXGSHGGELRGCSQGWAPGIAHLNICT

SEQ ID NO: 1841 - protein, 42 aa, Homo sapiens
YTFQCLSQTCSYDIKCYFLVAKIILDSVIKVYWNLNFKMSPD

SEQ ID NO: 1842 - protein, 265 aa, Homo sapiens
  SITE (22): Xaa equals any of the naturally occurring L-amino acids
PKLELHRGGGRSRTSGSPGLQXFGTRRTRGRSGRAQGRLKRPGKLACRKFPGRRQRVVPELTDVLMNEILHGADGTSIKCGIIGEIGCSWPLTESERKVLQATAHAQAQLGCPVIIHPGRSSRAPFQIIRILQEAGADISKTVMSHLDRTILDKKELLEFAQLGCYLEYDLFGTELLHYQLGPDIDMPDDNKRIRRVRLLVEEGCEDRILVAHDIHTKTRLMKYGGHGYSHILTNVVPKMLLRGITENVLDKILIENPKQWLTFK

SEQ ID NO: 1843 - protein, 503 aa, Homo sapiens
MEQRHVLLKQKELGGEEPEPSLREGPGGLVMEGHLFKRASNAFKTWSRRWFTIQSNQLVYQKKYKDPVTVVVDDLRLCTVKLCPDSERRFCFEVVSTSKSCLLQADSERLLQLWVSAVQSSIASAFSQARLDDSPRGPGQGSGHLAIGSAATLGSGGMARGREPGGVGHVVAQVQSVDGNAQCCDCREPAPEWASINLGVTLCIQCSGIHRSLGVHFSKVRSLTLDSWEPELVKLMCELGNVIINQIYEARVEAMAVKKPGPSCSRQEKEAWIHAKYVEKKFLTKLPEIRGRRGGRGRPRGQPPVPPKPSIRPRPGSLRSKPEPPSEDLGSLHPGALLFRASGHPPSLPTMADALAHGADVNWVNGGQDNATPLIQATAANSLLACEFLLQNGANVNQADSAGRGPLHHATILGHTGLACLFLKRGADLGARDSEGRDPLTIAMETANADIVTLLRLAKMREAEAAQGQAGDETYLDIFRDFSLMASDDPEKLSRRSHDLHTL

SEQ ID NO: 1844 - protein, 25 aa, Homo sapiens
MSPSIRILLVLQQLGSLMAPLPSAH

SEQ ID NO: 1845 - protein, 25 aa, Homo sapiens
MSPSIRILLVLQQLGSLMAPLPSAH

SEQ ID NO: 1846 - protein, 6 aa, Homo sapiens
VFQIYL

SEQ ID NO: 1847 - protein, 6 aa, Homo sapiens
VFQIYL

SEQ ID NO: 1848 - protein, 107 aa, Homo sapiens
MLVLLLDFLGLVHLGQLLIFHIYLKAKKMTTFEYLINNRKEESSKHQAVRKDPYVQMDKGVLQQGAGALGSSAQGVKAKSSLLIHKHLCHFCTSVNQDGDSTARVHL

SEQ ID NO: 1849 - protein, 245 aa, Homo sapiens
MLQARNQSPSSQRPLDVLRRNQDPQSPASISVIIFITPKEEPALQEGLHLQEDGLPATAEDAATCLTVLSSQPASCRASCCLRADGPGMLAHTCEHSTGKWEHSTRKWEHSTGKWEHSTGKWGLTALQNGSTVLGNGSTVLGSGSTVLRSGSTVLRNGSTLLRNGSTVLGNGHTVLGNGHTVLRNGSTVLGNGSTVLGNGSPQYWERGVHSTRKWEHSTGKWEHSTGKWEHSTGKPQTWILSFSA

SEQ ID NO: 1850 - protein, 209 aa, Homo sapiens
  SITE (136): Xaa equals any of the naturally occurring L-amino acids
  SITE (161): Xaa equals any of the naturally occurring L-amino acids
  SITE (169): Xaa equals any of the naturally occurring L-amino acids
  SITE (197): Xaa equals any of the naturally occurring L-amino acids
MAMGLFRVCLVVVTAIINHPLLFPRENATVPENEEEIIRKMQAHQEKLQLEQLRLEEEVARLAAEKEALEQVAEEGRQQNETRVAWDLWSTLCMILFLMIEVWRQDHQEGPSPECLGGEEDELPGWGAPPCRASPXPTRHACHFYERCIRGATADAARTRXFLEGFVDXLLEALRSLCNRDTDMEVEDFIGVDSMYXNWQVDRPLLCHL

SEQ ID NO: 1851 - protein, 547 aa, Homo sapiens
MAMGLFRVCLVVVTAIINHPLLFPRENATVPENEEEIIRKMQAHQEKLQLEQLRLEEEVARLAAEKEALEQVAEEGRQQNETRVAWDLWSTLCMILFLMIEVWRQDHQEGPSPECLGGEEDELPGLGGAPLQGLTLPNKATLGHFYERCIRGATADAARTREFLEGFVDDLLEALRSLCNRDTDMEVEDFIGVDSMYENWQVDRPLLCHLFVPFTPPEPYRFHPELWCSGRSVPLDRQGYGQIKVVRADGDTLSCICGKTKLGEDMLCLLHGRNSMAPPCGDMENLLCATDSLYLDTMQVMKWFQTALTRAWKGIAHKYEFDLAFGQLDSPGSLKIKFRSGKFMPFNLIPVIQCDDSDLYFVSHLPREPSEGTPASSTDWLLSFAVYERHFLRTTLKALPEGACHLSCLQIASFLLSKQSRLTGPSGLSSYHLKTALLHLLLLRQAADWKAGQLDARLHELLCFLEKSLLQKKLHHFFIGNRKVPEAMGLPEAVLRAEPLNLFRPFVLQRSLYRKTLDSFYEMLKNAPALISEYSLHVPSDQPTPKS

SEQ ID NO: 1852 - protein, 213 aa, Homo sapiens
LLFLSLLQMQELLGRGAWAPGCGRRPSGWGQLACPDPLLPPHNPKSPQPGPSTSGVWGEEQGLRTLSSEHPWQGLQPLISSLKPCGHTARRDLPLAPASFQPRVLIQGPRTVPPVLLCPQHKARLHSQKCSQALEGDPASSPTAPHPTHPSAAPLLFPRDLSYTGQEAAERVSPPPSKRSCSLCQNRVWAGGRALGARPLPLPAGFSWSLCWK

SEQ ID NO: 1853 - protein, 179 aa, Homo sapiens
  SITE (91): Xaa equals any of the naturally occurring L-amino acids
  SITE (140): Xaa equals any of the naturally occurring L-amino acids
  SITE (169): Xaa equals any of the naturally occurring L-amino acids
MGMGRGAGRSALGFWPTLAFLLCSFPAATSPCKILKCNSEFWSATSGSHAPASDDTPEFCAALRSYALCTRRTARTCRGDLAYHSAVHGIXDLMSQHNCSKDGPTSQPRLRTLPPAETARSARTAPRSAITRRAFTSTRXPPTTRTVASSGTHTFRTFTDRFQTCKVQXRLAAHRQLIT

SEQ ID NO: 1854 - protein, 357 aa, Homo sapiens
  SITE (140): Xaa equals any of the naturally occurring L-amino acids
  SITE (325): Xaa equals any of the naturally occurring L-amino acids
  SITE (329): Xaa equals any of the naturally occurring L-amino acids
  SITE (335): Xaa equals any of the naturally occurring L-amino acids
  SITE (338): Xaa equals any of the naturally occurring L-amino acids
  SITE (339): Xaa equals any of the naturally occurring L-amino acids
MGMGRGAGRSALGFWPTLAFLLCSFPAATSPCKILKCNSEFWSATSGSHAPASDDTPEFCAALRSYALCTRRTARTCRGDLAYHSAVHGIEDLMSQHNCSKDGPTSQPRLRTLPPAGDSQERSDSPEICHYEKSFHKHSXTPNYTHCGLFGDPHLRTFTDRFQTCKVQGAWPLIDNNYLNVQVTNTPVLPGSAATATSKLTIIFKNFQECVDQKVYQAEMDELPAAFVDGSKNGGDKHGANSLKITEKVSGQHVEIQAKYIGTTIVVRQVGRYLTFAVRMPEEVVNAVEDWDSQGLYLCLRGCPLNQQIDFQAFHTNAEGTGARXLAAXSLDPQXPRXXHTRQAVAKCKEKLPVEDL

SEQ ID NO: 1855 - protein, 434 aa, Homo sapiens
MGMGRGAGRSALGFWPTLAFLLCSFPAATSPCKILKCNSEFWSATSGSHAPASDDTPEFCAALRSYALCTRRTARTCRGDLAYHSAVHGIEDLMSQHNCSKDGPTSQPRLRTLPPAGDSQERSDSPEICHYEKSFHKHSATPNYTHCGLFGDPHLRTFTDRFQTCKVQGAWPLIDNNYLNVQVTNTPVLPGSAATATSKLTIIFKNFQECVDQKVYQAEMDELPAAFVDGSKNGGDKHGANSLKITEKVSGQHVEIQAKYIGTTIVVRQVGRYLTFAVRMPEEVVNAVEDWDSQGLYLCLRGCPLNQQIDFQAFHTNAEGTGARRLAAASPAPTAPETFPYETAVAKCKEKLPVEDLYYQACVFDLLTTGDVNFTLAAYYALEDVKMLHSNKDKLHLYERTRDLPGRAAAGLPLAPRPLLGALVPLLALLPVFC

SEQ ID NO: 1856 - protein, 712 aa, Homo sapiens
MGQGLKAWPRYRVVGSADAGQYNLEITDAELSDDASYECQATEAALRSRRAKLTVLIPPEDTRIDGGPVILLQAGTPHNLTCRAFNAKPAATIIWFRDGTQQEGAVASTELLKDGKRETTVSQLLINPTDLDIGRVFTCRSMNEAIPSGKETSIELDVHHPPTVTLSIEPQTVQEGERVVFTCQATANPEILGYRWAKGGFLIEDAHESRYETNVDYSFFTEPVSCEVHNKVGSTNVSTLVNVHFAPRIVVDPKPTTTDIGSDVTLTCVWVGNPPLTLTWTKKDSNMGPRPPGSPPEAALSAQVLSNSNQLLLKSVTQADAGTYTCRAIVPRIGVAEREVPLYVNGPPIISSEAVQYAVRGDGGKVECFIGSTPPPDRIAWAWKENFLEVGTLERYTVERTNSGSGVLSTLTINNVMEADFQTHYNCTAWNSFGPGTAIIQLEEREVLPVGIIAGATIGASILLIFFFIALVFFLYRRRKGSRKDVTLRKLDIKVETVNREPLTMHSDREDDTASVSTATRVMKAIYSSFKDDVDLKQDLRCDTIDTREEYEMKDPTNGYYNVRAHEDRPSSRAVLYADYRAPGPARFDGRPSSRLSHSSGYAQLNTYSRGPASDYGPEPTPPGPAAPAGTDTTSQLSYENYEKFNSHPFPGAAGYPTYRLGYPQAPPSGLERTPYEAYDPIGKYATATRFSYTSQHSDYGQRFQQRMQTHV

SEQ ID NO: 1857 - protein, 81 aa, Homo sapiens [sequence omitted]

SEQ ID NO: 1858 - protein, 81 aa, Homo sapiens [sequence omitted]

SEQ ID NO: 1859 - protein, 104 aa, Homo sapiens
MYWGIFFSILNFLAFFSLVLISVLLWTGMVVFRSLDPGAELVGFESHLYHCCVTSGNLPNFPGPQFSYIENGNNKSICFIGLLREFANSIYANLLDQCLAHNSQ

SEQ ID NO: 1860 - protein, 104 aa, Homo sapiens; identical to SEQ ID NO: 1859

SEQ ID NO: 1861 - protein, 75 aa, Homo sapiens
  SITE (23): Xaa equals any of the naturally occurring L-amino acids
  SITE (36): Xaa equals any of the naturally occurring L-amino acids
  SITE (44): Xaa equals any of the naturally occurring L-amino acids
MASYKTLKMLFSCLLTCSVSNEXYAVIFNFFPLYIXFLSDCFKXFSLSLVLSNLIIIYLGVIFFIFFVLDIHRSS

SEQ ID NO: 1862 - protein, 72 aa, Homo sapiens
  SITE (1): Xaa equals any of the naturally occurring L-amino acids
  SITE (10): Xaa equals any of the naturally occurring L-amino acids
  SITE (11): Xaa equals any of the naturally occurring L-amino acids
XYTFVNSRSXXLIDFLCVIMGHLFLVHFMPDILKFKTKYCEFYLVLCWIFFVFLSTIMSFLLGCSYSHWKQF

SEQ ID NO: 1863 - protein, 75 aa, Homo sapiens
MASYKTLKMLFSCLLTCSVSNEQYAVIFNFFPLYICFLSDCFKCFSLSLVLSNLIIIYLGVIFFIFFVLDIHRSS

SEQ ID NO: 1864 - protein, 63 aa, Homo sapiens
  SITE (37): Xaa equals any of the naturally occurring L-amino acids
MRLCQRPGLVLALPPQLSFSTARGGDSRMLGLPLGRXTSGKVQGDSTTVKLRFGLQLGVLGQR

SEQ ID NO: 1865 - protein, 157 aa, Homo sapiens
GQRGRPAATSHRILSSHSLASGCPVFRGGEGTGARSTPLALLLDPKARPDPFIPWGAPASAIGMRSLKSLHKQVRDPPTCRSWATPRAIPRGCGRTQPPTDRRPESSEGAIPIPTSGEARTAIVASGKTQLEPNGPCPHCNCAENVSQMTQIGSYFF

SEQ ID NO: 1866 - protein, 47 aa, Homo sapiens
MRLCQRPGLVLALPPQLSFSTARGGDSRMLGLPLGRGTLEGQGDPQL

SEQ ID NO: 1867 - protein, 89 aa, Homo sapiens [sequence omitted]

SEQ ID NO: 1868 - protein, 89 aa, Homo sapiens [sequence omitted]

SEQ ID NO: 1869 - protein, 93 aa, Homo sapiens [sequence omitted]

SEQ ID NO: 1870 - protein, 304 aa, Homo sapiens
  SITE (98): Xaa equals any of the naturally occurring L-amino acids
  SITE (166): Xaa equals any of the naturally occurring L-amino acids
  SITE (231): Xaa equals any of the naturally occurring L-amino acids
MSSSEMWTVLWHRFSMVLRLPEEASAQEGELSLSSPPSPEPDWTLISPQGIFLSHGSILMSILKHLLCPSFLNQLRQAPHGSEFLPVVVLSVCQLLCXPFALDMDADLLIDVLADLRDSEVAAHLLQVCCYHLPLMQVELPISLLTRLALMDPTSLNQFVNTVSAXPRTIVSFLSVALLSDQPLLTSDLLSLLAHTARVLSPSHLSFIQELLAGSDESYRPLRSSWATQRXLCGHTLIGSWDTCSNTAWPCVGHCRASLDCSAFCCLGLETRILLCGAVPALLWAMQPTRLVLWDLPWQLQCPV

SEQ ID NO: 1871 - protein, 91 aa, Homo sapiens
  SITE (54): Xaa equals any of the naturally occurring L-amino acids
  SITE (71): Xaa equals any of the naturally occurring L-amino acids
  SITE (89): Xaa equals any of the naturally occurring L-amino acids
MAVMCVAGLFFIPVAGLTGFHVVLVARGRTTNEQVTGKFRGGVNPFTNGCCNNXSRVLCSSPAPRYLGRPXKEKTIVIRPPFLRPRSFXWA

SEQ ID NO: 1872 - protein, 210 aa, Homo sapiens
MAVMCVAGLFFIPVAGLTGFHVVLVARGRTTNEQVTGKFRGGVNPFTNGCCNNVSRVLCSSPAPRYLGRPKKEKTIVIRPPFLRPEVSDGQITVKIMDNGIQGELRRTKSKGSLEITESQSADAEPPPPPKPDLSRYTGLRTHLGLATNEDSSLLAKDSPPTPTMYKYRPGYSSSSTSAAMPHSSSAKVLSTLRGGVITCQLARHSGSFL

SEQ ID NO: 1873 - protein, 193 aa, Homo sapiens
  SITE (53): Xaa equals any of the naturally occurring L-amino acids
MGPLSPARTLRLWGPRSLGVALGVFMTIGFALQLLGGPFQRRLPGLQLRQPSXPSLRPALPSCPPRQRLVFLKTHKSGSSSVLSLLHRYGDQHGLRFALPARYQFGYPKLFQASRVKGYRPQGGGTQLPFHILCHHMRFNLKEVLQVMPSDSFFFSIVRDPAALARSAFSYYKSTSSAFRKSPSLAAFLANPR

SEQ ID NO: 1874 - protein, 461 aa, Homo sapiens
  SITE (28): Xaa equals any of the naturally occurring L-amino acids
  SITE (168): Xaa equals any of the naturally occurring L-amino acids
  SITE (169): Xaa equals any of the naturally occurring L-amino acids
  SITE (171): Xaa equals any of the naturally occurring L-amino acids
  SITE (178): Xaa equals any of the naturally occurring L-amino acids
  SITE (442): Xaa equals any of the naturally occurring L-amino acids
MTIGFALQLLGGPFQRRLPGLQLRQPSXPSLRPALPSCPPRQRLVFLKTHKSGSSSVLSLLHRYGDQHGLRFALPARYQFGYPKLFQASRVKGYRPQGGGTQLPFHILCHHMRFNLKEVLQVMPSDSFFFSIVRDPAALARSAFSYYKSTSSAFRKSPSLAAFLANPXXFXRPGARGXHYARNLLWFDFGLPFPPEKRAKRGNIHPPRDPNPPQLQVLPSGAGPRAQTLNPNALIHPVSTVTDHRSQISSPASFDLGSSSFIQWGLAWLDSVFDLVMVAEYFDESLVLLADALCWGLDDVVGFMHNAQAGHKQGLSTVSNSGLTAEDRQLTARARAWNNLDWALYVHFNRSLWARIEKYGQGRLQTAVAELRARREALAKHCLVGGEASDPKYITDRRFRPFQFGSAKVLGYILRSGLSPQDQEECERLATPELQYKDKLDXKQFPPTVSLPLKTSRPLSP

SEQ ID NO: 1875 - protein, 191 aa, Homo sapiens
MGPLSPARTLRLWGPRSLGVALGVFMTIGFALQLLGGPFQRRLPGLQLRQPSAPSLRPALPSCPPRQRLVFLKTHKSGSSSVLSLLHRYGDQHGLRFALPARYQFGYPKLFQASRVKGYRPQGGGTQLPFHILCHHMRFNLKEVLQVMPSDSFFFSIVRDPAGLARSAFSYYKSTSSTFRKSPSLAAFLAN

SEQ ID NO: 1876 - protein, 83 aa, Homo sapiens
  SITE (65): Xaa equals any of the naturally occurring L-amino acids
MAPAIVTLGLLLPLAPADLCLPALGSSRLPRGPPQLPSIPVSQPLPRGFLREHPQPHKLQPIPPXSQKALFLEPRRRLWPPSP

SEQ ID NO: 1877 - protein, 96 aa, Homo sapiens
MSIPMVSVLLCQAPLLIQVALPRTVAIRKKRLCLVDSILQTWHLFNFFLVGFIFQSIFRFTAKLSESTEISHLFFAPTQAKPHLLPISPTREVHLL

SEQ ID NO: 1878 - protein, 86 aa, Homo sapiens
MSFRSELAMWFQAALVSSLVLPTPPGSGGTSRRKKWIKSWRDFKQYLTHSSRHDSHQLRSSNAFLFDAQEGPSAVDIAKDEIQRQR

SEQ ID NO: 1879 - protein, 130 aa, Homo sapiens
  SITE (67): Xaa equals any of the naturally occurring L-amino acids
MLQTTLPSSQTVSLCLWVGASQPPPSFLCCQLQVFLCLLHTTRRCPSALPALVRVVPVSHCQTSWLXCGDLFLCLRSFLRSVHSSGVSPCLEQIASPFSTCLLKLWSTCDCKFSAATPEPSSSHSFTFMD

SEQ ID NO: 1880 - protein, 96 aa, Homo sapiens
MLMVRLFNSFPHALLILFLWGEQSPLTKPCPTHWAPVWMVPGPQVLWGTHWGLPGNHFCRIRSHTRRAQCPREGPFPTTLPHWGWVTGTYRGWCCL

SEQ ID NO: 1881 - protein, 122 aa, Homo sapiens
MLMVRLFNSFPHALLILFLWGEQSPLTKPCPTHWAPVWMVPGPQVLWGTHWGLPGNHFCRIRSHTRRAQCPREGPFPTTLPHWGWVTGTYRGWCCLASPACGGSWVLLPFGFVFYLSGWASF

SEQ ID NO: 1882 - protein, 122 aa, Homo sapiens; identical to SEQ ID NO: 1881

SEQ ID NO: 1883 - protein, 65 aa, Homo sapiens
MPRSSWRPAPSRPWMPWSCASSWSTSGLWTLLCTRAACTSSQRPTTTCWDQPRRLTLLCSGACSR

SEQ ID NO: 1884 - protein, 66 aa, Homo sapiens
  SITE (14): Xaa equals any of the naturally occurring L-amino acids
  SITE (28): Xaa equals any of the naturally occurring L-amino acids
SQLLGRLRQENRLXPGGGGWSERRSCHXTPAWVTERQTVSKKKKKKKNVRKEVESYFHLYFSHCLA

SEQ ID NO: 1885 - protein, 242 aa, Homo sapiens
  SITE (172): Xaa equals any of the naturally occurring L-amino acids
  SITE (197): Xaa equals any of the naturally occurring L-amino acids
  SITE (198): Xaa equals any of the naturally occurring L-amino acids
  SITE (205): Xaa equals any of the naturally occurring L-amino acids
  SITE (214): Xaa equals any of the naturally occurring L-amino acids
  SITE (228): Xaa equals any of the naturally occurring L-amino acids
  SITE (233): Xaa equals any of the naturally occurring L-amino acids
  SITE (236): Xaa equals any of the naturally occurring L-amino acids
MHRLAPHCSFARWLLCNGSLFRYKHPSEEELRALAGKPRPRGRKERWANGLSEEKPLSVPRDAPFQLETCPLTTVDALVLRFFLEYQWFVDFAVYSGGVYLFTEAYYYMLGPAKETNIAVFWCLLTVTFSIKMFLTVTRLYFSAEEGGERSVCLTFAFLFLLLAMLVQVVRXETLELGLDLAGSMTQNLEPLLKKQXXDWALPVXKLLSRDCMXLGWCFYFSWVATRXCIEKXYLXKSVCTG

SEQ ID NO: 1886 - protein, 479 aa, Homo sapiens
MAVLGVQLVVTLLTATLMHRLAPHCSFARWLLCNGSLFRYKHPSEEELRALAGKPRPRGRKERWANGLSEEKPLSVPRDAPFQLETCPLTTVDALVLRFFLEYQWFVDFAVYSGGVYLFTEAYYYMLGPAKETNIAVFWCLLTVTFSIKMFLTVTRLYFSAEEGGERSVCLTFAFLFLLLAMLVQVVREETLELGLEPGLASMTQNLEPLLKKQGWDWALPVAKLAIRVGLAVVGSVLGAFLTFPGLRLAQTHRDALTMSEDRPMLQFLLHTSFLSPLFILWLWTKPIARDFLHQPPFGETRFSLLSDSAFDSGRLWLLVVLCLLRLAVTRPHLQAYLCLAKARVEQLRREAGRIEAREIQQRVVRVYCYVTVVSLQYLTPLILTLNCTLLLKTLGGYSWGLGPAPLLSPDPSSASAAPIGSGEDEVQQTAARIAGALGGLLTPLFLRGVLAYLIWWTAACQLLASLFGLYFHQHLAGS

SEQ ID NO: 1887 - protein, 122 aa, Homo sapiens
MRHHTWLIFLILIFVEMGGQVSLCCPGCSRTPGHKPSSHLSLPMRRNYRWLRCEPPCLAFLHYLEIRWEEAFFWVGLRRHTEVPQVIGAGPLPFSPPWVVVDRSLGWDGEERSCCVSCLLFK

SEQ ID NO: 1888 - protein, 122 aa, Homo sapiens; identical to SEQ ID NO: 1887

SEQ ID NO: 1889 - protein, 92 aa, Homo sapiens
MELVFLIISLVCQHCSPDSAGDLCVQTPSVWPRTLMEIMLSSLGEFALSNNQRFVCFNNIHSSWAWWLTSVIPALWEADTGGLLEARSLRPA

SEQ ID NO: 1890 - protein, 92 aa, Homo sapiens; identical to SEQ ID NO: 1889

SEQ ID NO: 1891 - protein, 99 aa, Homo sapiens
  SITE (96): Xaa equals any of the naturally occurring L-amino acids
MFAFSPLSRLAMLGVCCGCCLGLFLESDTGINFLNFNYLASYSWSSRSSNFNNLGIFSFFFFETESRSVAQAGVQWHYLSSLQALPPGFTPFSCLXPTE

SEQ ID NO: 1892 - protein, 100 aa, Homo sapiens
MFAFSPLSRLAMLGVCCGCCLGLFLESDTGINFLNFNYLASYSWSSRSSNFNNLGIFSFFFFETESRSVAQAGVQWHYLSSLQALPPGFTPFSCLSLPSS

SEQ ID NO: 1893 - protein, 167 aa, Homo sapiens; identical to SEQ ID NO: 1674
  SITE (140): Xaa equals any of the naturally occurring L-amino acids

SEQ ID NO: 1894 - protein, 167 aa, Homo sapiens; identical to SEQ ID NO: 1674
  SITE (140): Xaa equals any of the naturally occurring L-amino acids

SEQ ID NO: 1895 - protein, 93 aa, Homo sapiens
MKEQSLPSFLWKMLLWYCLVCCDTLESFVSVFSLYPGTALGIWEALTVYGRCAQFFCFQGAKEVAVHMETFLFLECEGWGPKQVPNAAAFLLV

SEQ ID NO: 1896 - protein, 41 aa, Homo sapiens [sequence omitted]

SEQ ID NO: 1897 - protein, 93 aa, Homo sapiens; identical to SEQ ID NO: 1895

SEQ ID NO: 1898 - protein, 117 aa, Homo sapiens
  SITE (89): Xaa equals any of the naturally occurring L-amino acids
  SITE (111): Xaa equals any of the naturally occurring L-amino acids
  SITE (116): Xaa equals any of the naturally occurring L-amino acids
MTSIWHRPVCPLSWLVPSAAFSNWGPGCRAVCSPRWATPAKIPTPKCDRVAHEEGSALRVPSRVHSSSQLLRVAPASPTSSLSPVMSRXPPPSRVSVWLFVCLPTRLPVPXALPLXP

SEQ ID NO: 1899 - protein, 38 aa, Homo sapiens
ISHVLIDAYISLKRIKSSCNPTTLGMCSEDLLRLCHWS

SEQ ID NO: 1900 - protein, 88 aa, Homo sapiens
MTSIWHRPVCPLSWLVPSAAFSNWGPGCRAVCSPRWATPAKIPTPKCDRVAHEEGSALRVPSRVHSSSQLLRVAPASPTSSLSPVMSR

SEQ ID NO: 1901 - protein, 88 aa, Homo sapiens; identical to SEQ ID NO: 1900

SEQ ID NO: 1902 - protein, 113 aa, Homo sapiens
  SITE (57): Xaa equals any of the naturally occurring L-amino acids
  SITE (73): Xaa equals any of the naturally occurring L-amino acids
MNSAFSTCLLLLQDLGVPLTLTGLPPALGLAPPVLEPRAPGLELPLWGGSQAPPLPXLSSVPCSAPPLYLSVXRPLTERRCRVSRGPRWSQGQGWDLQGTRGAHGLRHLCPGS

SEQ ID NO: 1903 - protein, 117 aa, Homo sapiens
MWRVSISVPWLWSAWPISSVGFLCLPASPHPSLPPSSTLHDLAVTSGPERWRQLTAAARTVSRVRSAAGWGSWPCPASMNSCPRTVCLWNLRSIYCVCSSRLSTSCRKSPRITMPTQ

SEQ ID NO: 1904 - protein, 117 aa, Homo sapiens; identical to SEQ ID NO: 1903

SEQ ID NO: 1905 - protein, 124 aa, Homo sapiens
  SITE (118): Xaa equals any of the naturally occurring L-amino acids
MIKSAPVGPVAGGIMGCIMVLVLAVYAYRHQIHRRSHQHMSPLAAQEMSVRMSNLENDRDERDDDSHEDRGIISNTRFIAAVIERHAHSPERRRRYWGRSGTESDHGYSTMSPQEDSXKSSMQQ

SEQ ID NO: 1906 - protein, 165 aa, Homo sapiens
  SITE (145): Xaa equals any of the naturally occurring L-amino acids
  SITE (147): Xaa equals any of the naturally occurring L-amino acids
  SITE (148): Xaa equals any of the naturally occurring L-amino acids
  SITE (152): Xaa equals any of the naturally occurring L-amino acids
MAVYLLWQELGPAVLAGVAVLVFVIPINALAATKIKKLKVSLATLCVYFLLDEGNILTATKVFTSMSLFNILRIPLFELPTVISAVVQTKISLGRLEDFLNTEELLPQSIETNYTGDHAIGFTDASFSWDKTGMPVLKEALWLMXLXXPGFXIAFCKKTFSLAPS

SEQ ID NO: 1907 - protein, 50 aa, Homo sapiens
CYRCIFSIVSNRFIFSNPWISSCIFTISKQSDSIAKRQKCEFFFKLVNTC

SEQ ID NO: 1908 - protein, 84 aa, Homo sapiens
MIMSSVTLLWSILHQADSSEKMTIAASASLTTINLGATKNLRQQILELLGPISMNHGVHFMAAIAFVWNERRQNKTTTRTKVCI

SEQ ID NO: 1909 - protein, 84 aa, Homo sapiens; identical to SEQ ID NO: 1908

SEQ ID NO: 1910 - protein, 275 aa, Homo sapiens
  SITE (71): Xaa equals any of the naturally occurring L-amino acids
  SITE (153): Xaa equals any of the naturally occurring L-amino acids
MWSYHLIGLIWTSEFILACQQMTIAGAVVTCYFNRSKNDPPDHPILSSLSILFFYHQGTIVKGSFLISVVXIPRIIVMYMQNALKEQQHGALSRYLFRCCYCCFWCLDKYLLHLNQNAYTTTAINGTDFCTSAKDAFKILSKNSSHFTSINCXGDFIIFLGKVLVVCFTVFGGLMAFNYNRAFQVWAVPLLLVAFFAYLVAHSFLSVFETVLDALFLCFAVDLETNDGSSEKPYFMDQEFLSFVKRSNKLNNARAQQDKHSLRNEEGTELQAIVR

SEQ ID NO: 1911 - protein, 275 aa, Homo sapiens [sequence omitted]

SEQ ID NO: 1912 - protein, 136 aa, Homo sapiens
  SITE (133): Xaa equals any of the naturally occurring L-amino acids
MACILKRKSVIAVSFIAAFLFLLVVRLVNEVNFPLLLNCFGQPGTKWIPFSYTYRRPLRTHYGYINVKTQEPLQLDCDLCAIVSNSGQMVGQKVGNEIDRSSCIWRMNNAPTKGYEEDVGRMTMIRVVPIPAXLFC

SEQ ID NO: 1913 - protein, 64 aa, Homo sapiens
VFTSAKYYGELSLKCAILDKGLLPTLFCNFDTSIFTPINITKPQFYRWKELLFFCCSLMQFLIL

SEQ ID NO: 1914 - protein, 305 aa, Homo sapiens [sequence omitted]

SEQ ID NO: 1915 - protein, 305 aa, Homo sapiens [sequence omitted]

SEQ ID NO: 1916 - protein, 80 aa, Homo sapiens
  SITE (65): Xaa equals any of the naturally occurring L-amino acids
MDSGGWMDGDTRQAFPCPWGLVSLPLAGVTLALHVFTASALPRELRSEKDWPGQSPGPIVSVPGXQEGILEGGPGTQFAL

SEQ ID NO: 1917 - protein, 331 aa, Homo sapiens
  SITE (249): Xaa equals any of the naturally occurring L-amino acids
  SITE (257): Xaa equals any of the naturally occurring L-amino acids
  SITE (298): Xaa equals any of the naturally occurring L-amino acids
  SITE (300): Xaa equals any of the naturally occurring L-amino acids
  SITE (301): Xaa equals any of the naturally occurring L-amino acids
MDRLKSHLTVCFLPSVPFLILVSTLATAKSVTNSTLNGTNVVLGSVPVIIARTDHIIVKEGNSALINCSVYGIPDPQFKWYNSIGKLLKEEEDEKERGGGKWQMHDSGLLNITKVSFSDRGKYTCVASNIYGTVNNTVTLRVIFTSGDMGVYYMVVCLVAFTIVMVLNITRLCMMSSHLKKTEKAINEFFRTEGAEKLQKAFEIAKRIPIITSAKTLELAKVTQFKTMEFARYIEELARSVPLPPLIMXCRTIMEEXMEVVGLEEQGQNFVRHTPEGQEAADRDEVYTIPNSLKRSDXPXXVLGRLIAARATSANCHQGVSSPAVQKRACR

SEQ ID NO: 1918 - protein, 77 aa, Homo sapiens
VGSLLGSSLVALLSLPGGWLHCPKDFGNINNCRMDLYFFLLAGIQAVTALLFVWIAGRYERASQGPASHSRFSRDRG

SEQ ID NO: 1919 - protein, 91 aa, Homo sapiens [sequence omitted]

SEQ ID NO: 1920 - protein, 91 aa, Homo sapiens [sequence omitted]

SEQ ID NO: 1921 - protein, 108 aa, Homo sapiens
MSLTPPTPVLFLFLSLLWARFFLSRLKCPGGCLCWPLLLSRGSSAAPWASVPMDGAAHAAISAPGLSVQLLPRQLASPSANTELRVLLLPARVRHYLPSSFHQVLGSS

SEQ ID NO: 1922 - protein, 108 aa, Homo sapiens; identical to SEQ ID NO: 1921

SEQ ID NO: 1923 - protein, 81 aa, Homo sapiens
  SITE (29): Xaa equals any of the naturally occurring L-amino acids
SFLFFFFFFFETGFRSVFQAGVQWCDLGXLPPRFKKFSCLSLPSSWDYRHALPHPVTFFCVFLVEMAFAMLAMAGLKLLAS

SEQ ID NO: 1924 - protein, 108 aa, Homo sapiens; identical to SEQ ID NO: 1921

SEQ ID NO: 1925 - protein, 136 aa, Homo sapiens
  SITE (59): Xaa equals any of the naturally occurring L-amino acids
  SITE (111): Xaa equals any of the naturally occurring L-amino acids
MYQPHTQSWFPWCLILSSSQAGTRGLSWHLANAPVKPGMGLAFALIRLDSLLTCYLPCXHVRLVRAHTCTSPTRPLLSYQSVPAASMICPPCEIPHGEGSFEVAGRSTEMXHLPVEIPRLPGQCQQSQKTHPLAWS

SEQ ID NO: 1926 - protein, 136 aa, Homo sapiens
MYQPHTQSWFPWCLILSSSQAGTRGLSWHLANAPVKPGMGLAFALIRLDSLLTCYLPCLHVRLVRAHTCTSPTRPLLSYQSVPAASMICPPCEIPHGEGSFEVAGRSTEMSHLPVEIPRLPGQCQQSQKTHPLAWS

SEQ ID NO: 1927 - protein, 86 aa, Homo sapiens [sequence omitted]

SEQ ID NO: 1928 - protein, 99 aa, Homo sapiens [sequence omitted]

SEQ ID NO: 1929 - protein, 99 aa, Homo sapiens [sequence omitted]

SEQ ID NO: 1930 - protein, 84 aa, Homo sapiens
  SITE (65): Xaa equals any of the naturally occurring L-amino acids
MWSSSWDHRITTPRLANFFFFFFFFFFVEMGFRYVGQAGLKLLASSNLPALASQSAGITGVSHHXWLGGLIKTPILSLTPRVSG

SEQ ID NO: 1931 - protein, 178 aa, Homo sapiens [sequence omitted]

SEQ ID NO: 1932 - protein, 468 aa, Homo sapiens
  SITE (19): Xaa equals any of the naturally occurring L-amino acids
  SITE (125): Xaa equals any of the naturally occurring L-amino acids
MNSQNSGFTQRRRMALGIXILLLVDVIWVASSELTSYVFTQYNKPFFSTFAKTSMFVLYLLGFIIWKPWRQQCTRGLRGKHAAFFADAEGYFAACTTDTTMNSSLSEPLYVPVKFHDLPSEKPEXTNIDTEKTPKKSRVRFSNIMEIRQLPSSHALEAKLSRMSYPVKEQESILKTVGKLTATQVAKISFFFCFVWFLANLSYQEALSDTQVAIVNILSSTSGLFTLILAAVFPSNSGDRFTLSKLLAVILSIGGVVLVNLAGSEKPAGRDTVGSIWSLAGAMLYAVYIVMIKRKVDREDKLDIPMFFGFVGLFNLLLLWPGFFLLHYTGFEDFEFPNKVVLMCIIINGLIGTVLSEFLWLWGCFLTSSLIGTLALSLTIPLSIIADMCMQKVQFSWLFFAGAIPVFFSFFIVTLLCHYNNWDPVMVGIRRIFAFICRKHRIQRVPEDSEQCESLISMHSVSQEDGAS

SEQ ID NO: 1933 - protein, 178 aa, Homo sapiens [sequence omitted]

SEQ ID NO: 1934 - protein, 116 aa, Homo sapiens
  SITE (95): Xaa equals any of the naturally occurring L-amino acids
  SITE (112): Xaa equals any of the naturally occurring L-amino acids
MLVAWCLAPGDLLLLVIITLPRKEVTGSMSTVCQCEAQPAMLPKGHFTHHSPKAARKAQEGTRKARWVALEDSAPFHPSPGWGLILQLHPQPMNXSQSAWKHCCWKNCEEPXEGKK

SEQ ID NO: 1935 - protein, 74 aa, Homo sapiens
  SITE (69): Xaa equals any of the naturally occurring L-amino acids
KTPHSWVIHAGEASCHVERTLKQSYGAAHMRGTEAPSHQPCEPPWKWSLQHQSSFQMIAAPNTILTSIXRTSAS

SEQ ID NO: 1936 - protein, 127 aa, Homo sapiens
  SITE (85): Xaa equals any of the naturally occurring L-amino acids
  SITE (88): Xaa equals any of the naturally occurring L-amino acids
  SITE (95): Xaa equals any of the naturally occurring L-amino acids
  SITE (107): Xaa equals any of the naturally occurring L-amino acids
  SITE (123): Xaa equals any of the naturally occurring L-amino acids
MKREGRCVLHMHPSSPPSRLSFFLFLRQSLALLPRLECSGVILAQRNLRLLGSRDSPASASCCPPSSLSRRWRWREVPEGLWGLXWVXLCSLSAXWTALKGSSPPFXAKQLGHHRNGINLAEXSLPK

SEQ ID NO: 1937 - protein, 44 aa, Homo sapiens
LMPVIPAIWETEAGGLLEARSLRQPGQHSETPSLQETFKNKNSS

SEQ ID NO: 1938 - protein, 89 aa, Homo sapiens
MNHRAWPFLPFFFFFLRRSLALSPRLECSGAVSAHCGLRLPGSRHSPASASRVAGTAGARYHARLVFFVFLVETGFHRVGQDGLDLLTS

SEQ ID NO: 1939 - protein, 89 aa, Homo sapiens; identical to SEQ ID NO: 1938

SEQ ID NO: 1940 - protein, 223 aa, Homo sapiens
  SITE (159): Xaa equals any of the naturally occurring L-amino acids
  SITE (208): Xaa equals any of the naturally occurring L-amino acids
  SITE (218): Xaa equals any of the naturally occurring L-amino acids
  SITE (221): Xaa equals any of the naturally occurring L-amino acids
MLHVTRGVWGSRVRVWPLLPALLGPPRALSSLAAKMGEYRKMWNPREPRDWAQQYRERFIPFSKEQLLRLLIQALYDPINPDRETLDQPSLTDPQRLSNEQEVLRALEPLLAQANFSPLSEDTLAYALVVHHPQDEVQVTVNLDQYVYIHFWALGQPSXADAPEVQRGLQACLLSPKLPLRERRYFKRVVLASPDQNGDTWDLKKFSXTPPLGKAWEXLLXGT

SEQ ID NO: 1941 - protein, 169 aa, Homo sapiens
  SITE (4): Xaa equals any of the naturally occurring L-amino acids
  SITE (18): Xaa equals any of the naturally occurring L-amino acids
  SITE (24): Xaa equals any of the naturally occurring L-amino acids
  SITE (108): Xaa equals any of the naturally occurring L-amino acids
SPKXPPAERRYFKRVVLXARTKRXHLVLKSFKDTPLEGLEQLLPELKVRTPTLQRALLNLMLVVSGVAIFVNVGMVVLTDLKVATSLLLLLFAIFMGLRASKCRAALXSCTGCSPSKDSWPRGQVEADTQLVSACQNACPVSRLSQPRGELPFTDSSQGWHRPQECRLV

SEQ ID NO: 1942 - protein, 327 aa, Homo sapiens
MLHVTRGVWGSRVRVWPLLPALLGPPRALSSLAAKMGEYRKMWNPREPRDWAQQYRERFIPFSKEQLLRLLIQALYDPINPDRETLDQPSLTDPQRLSNEQEVLRALEPLLAQANFSPLSEDTLAYALVVHHPQDEVQVTVNLDQYVYIHFWALGQRVGQMPLKSSVGSRRVFFTKLPPAERRYFKRVVLAARTKRGHLVLKSFKDTPLEGLEQLLPELKVRTPTLQRALLNLMLVVSGVAIFVNVGMVVLTDLKVATSLLLLLFAIFMGLRASKCRAALNSCTGCSPSKDSWPRGQVEADTQLVLRLPKCVSCLEAESAQRGAAFY

SEQ ID NO: 1943 - protein, 118 aa, Homo sapiens
MKDLWFLLLVVAAPTWVLSQVRLQESGPGLVSPSQTLSLTCSVSGINIGGGKYYWAWVRQRPGEGPEWVGYISYTGVADYNPSLRGRLTISLGESNSFSLTLTSMTAADAVVYYCATD

SEQ ID NO: 1944 - protein, 174 aa, Homo sapiens
KGVFYFFIFYLPLFSWLCSRVCVFACLLSCSFFFWMKTPAFPDSPPSSVLQFSEKSWDMWEGAWELGSLRLPGRQFRLCRKEQSPWEALGEGGAAGPARMVLPATGGLRVVSAPCISPSLLTFLLCFPPSVCQRGGTGNRTAVAALSLLSTVYSGLSGDSREPGHLAAVRPLNL

SEQ ID NO: 1945 - protein, 162 aa, Homo sapiens
  SITE (115): Xaa equals any of the naturally occurring L-amino acids
  SITE (143): Xaa equals any of the naturally occurring L-amino acids
MASALSYVSKFKSFVILFVTPLLLLPLVILMPAKVCVQYMKDTNMLFLGGLIVAVAVERWNLHKRIALRTLLWVGAKPARLMLGFMGVTALLSMWISNTATTAMMVPIVEAILQXMEATSAATEAGLELVDKGKAKELPGSQXIFEGPTLGQQEDQRAEEVV

SEQ ID NO: 1946 - protein, 173 aa, Homo sapiens
  SITE (59): Xaa equals any of the naturally occurring L-amino acids
  SITE (130): Xaa equals any of the naturally occurring L-amino acids
EEPQDHTHSPYPPQDYRTFWHTLYRVLGFTPQNDPTMSTHHQNPANGPPLPPSPDAEMXMGSWRVGSEMKGTPQWAAGPIFPKPCHYLCEGGQVAEGSGCRLLYPLCLKHPPHRALVFTRFVLDSLNGNXIPWLRAKTTTYQCPCPFQLTLSSLRSSLSLWKGHPSQGRNAWS

SEQ ID NO: 1947 - protein, 407 aa, Homo sapiens
  SITE (193): Xaa equals any of the naturally occurring L-amino acids
  SITE (357): Xaa equals any of the naturally occurring L-amino acids
MASALSYVSKFKSFVILFVTPLLLLPLVILMPAKVCVQYMKDTNMLFLGGLIVAVAVERWNLHKRIALRTLLWVGAKPARLMLGFMGVTALLSMWISNTATTAMMVPIVEAILQQMEATSAATEAGLELVDKGKAKELPGSQVIFEGPTLGQQEDQERKRLCKAMTLCICYAASIGGTATLTGTGPNVVLLGXMNELFPDSKDLVNFASWFAFAFPNMLVMLLFAWLWLQFVYMRFKYVSDATVAIFVATLLFIVPSQKPKFNFRSQTEEERKTPFYPPPLLDWKVTQEKVPWGIVLLLGGGFALAKGSEASGLSVWMGKQMEPLHAVPPAAITLILSLLVAVFTECTSNVATTTLXLPIFASMVKTGVIMNIIGVFCVFLAVNTWGRAIFDLDHFPDWANVTHIET

SEQ ID NO: 1948 - protein, 162 aa, Homo sapiens
MASALSYVSKFKSFVILFVTPLLLLPLVILMPAKVCVQYMKDTNMLFLGGLIVAVAVERWNLHKRIALRTLLWVGAKPARLMLGFMGVTALLSMWISNTATTAMMVPIVEAILQQMEATSAATEAGLELVDKGKAKELPGSQVIFEGPTLGQQEDQERKRLC

SEQ ID NO: 1949 - protein, 377 aa, Homo sapiens
  SITE (327): Xaa equals any of the naturally occurring L-amino acids
MPAKVCVQYMKDTNMLFLGGLIVAVAVERWNLHKRIALRTLLWVGAKPARLMLGFMGVTALLSMWISNTATTAMMVPIVEAILQQMEATSAATEAGLELVDKGKAKELPGSQVIFEGPTLGQQEDQERKRLCKAMTLCICYAASIGGTATLTGTGPNVVLLGQMNELFPDSKDLVNFASWFAFAFPNMLVMLLFAWLWLQFVYMRFKYVSDATVAIFVATLLFIVPSQKPKFNFRSQTEEERKTPFYPPPLLDWKVTQEKVPWGIVLLLGGGFALAKGSEASGLSVWMGKQMEPLHAVPPAAITLILSLLVAVFTECTSNVATTTLXLPIFASMVKTGVIMNIIGVFCVFLAVNTWGRAIFDLDHFPDWANVTHIET

SEQ ID NO: 1950 - protein, 104 aa, Homo sapiens
  SITE (63): Xaa equals any of the naturally occurring L-amino acids
  SITE (74): Xaa equals any of the naturally occurring L-amino acids
  SITE (103): Xaa equals any of the naturally occurring L-amino acids
MSLLLLLSVLMSPGARPSDPVEVIASGPTVASSHNVQDCLHILNRYGLRAALPRSVKTVLSRXDSDPHGPHTCXHVLNVIIGSNVLALAEAQRQAEALGYKLXC

SEQ ID NO: 1951 - protein, 81 aa, Homo sapiens
QVPMSWTPTSCSCGLGDGIGHILGVQRRPTRARSDGRASQTGRWGLPPTPEDEDKPLGQFSVPVLLPWAASLLSPSPCFFL

SEQ ID NO: 1952 - protein, 295 aa, Homo sapiens
MSLLLLLSVLMSPGARPSDPVEVIASGPTVASSHNVQDCLHILNRYGLRAALPRSVKTVLSRADSDPHGPHTCGHVLNVIIGSNVLALAEAQRQAEALGYQAVVLSAAMQGDVKSMAQFYGLLAHVARTRLTPSMAGASVEEDAQLHELAAELQIPDLQLEEALETMAWGRGPVCLLAGGEPTVQLQGSGRGGRNQELALRVGAELRRWPLGPIDVLFLSGGTDGQDGPTEAAGAWVTPELASQAAAEGLDIATFLAHNDSHTFFCCLQGGAHLLHTGMTGTNVMDTHLLFLRPR

SEQ ID NO: 1953 - protein, 116 aa, Homo sapiens
MWWALCSMLPLLGCACSSGCWGSGPTPLLAEPTFLCVSSRPHNPLSFLSVLPCSRGPGPSGLQGDGAGLPAHLGPLSCICLPSLLCDLGERQCPLWAVRSTQCLIAGKKVLQRLCP

SEQ ID NO: 1954 - protein, 116 aa, Homo sapiens; identical to SEQ ID NO: 1953

SEQ ID NO: 1955 - protein, 116 aa, Homo sapiens; identical to SEQ ID NO: 1953

SEQ ID NO: 1956 - protein, 82 aa, Homo sapiens
MAIPPFIMNTLEKKAFLKRFPWMSAPIQVGLVGFCLVFATPLCCALFPQKSSMSVTSLEAELQAKIQESHPELRRVYFNKGL

SEQ ID NO: 1957 - protein, 82 aa, Homo sapiens; identical to SEQ ID NO: 1956

SEQ ID NO: 1958 - protein, 18 aa, Homo sapiens
MRFSEAWTSPWCMTLLTC

SEQ ID NO: 1959 - protein, 18 aa, Homo sapiens
MRFSEAWTSPWCMTLLTC

SEQ ID NO: 1960 - protein, 43 aa, Homo sapiens
  SITE (8): Xaa equals any of the naturally occurring L-amino acids
MSMAMGSXTLLLGWGPGPGWDCGVMRVVLCWLPGGNCQGESST

SEQ ID NO: 1961 - protein, 79 aa, Homo sapiens [sequence omitted]

SEQ ID NO: 1962 - protein, 305 aa, Homo sapiens
MPANFTEGSFDSSGTGQTLDSSPVACTETVTFTEVVEGKEWGSFYYSFKTEQLITLWVLFVFTIVGNSVVLFSTWRRKKKSRMTFFVTQLAITEKQARVLIVIAWSLSFLFSIPTLIIFGKRTLSNGEVQCWALWPDDSYWTPYMTIVAFLVYFIPLTIISIMYGIVIRTIWIKSKTYETVISNCSDGKLCSSYNRGLISKAKIKAIKYSIIIILAFICCWSPYFLFDILDNFNLLPDTQERFYASVIIQNLPALNSAINPLIYCVFSSSISFPCREQRSQDSRMTFRERTERHEMQILSKPEFI

SEQ ID NO: 1963 - protein, 43 aa, Homo sapiens
MSMAMGSSTLLLGWGPGPGWDCGVMRVVLCWLPGGNCQGESST

SEQ ID NO: 1964 - protein, 161 aa, Homo sapiens
  SITE (104): Xaa equals any of the naturally occurring L-amino acids
MPTTLPSDLMLLWLGLPSLPSPVEEEGRLVKGLRLTLAAPASEVLPDWEDPPSHPTAWAQPRTHQPDTPNSIKSGIYSPCGGAVLRGAGAIVLRKEVCPSVRLXGRPGPKWGRKRGTARVKIPAYSGWEYVQGGGAQAGVGAGGPAAAAPTRGPPHLGPYL

SEQ ID NO: 1965 - protein, 161 aa, Homo sapiens [sequence omitted]

SEQ ID NO: 1966 - protein, 92 aa, Homo sapiens
  SITE (44): Xaa equals any of the naturally occurring L-amino acids
MGPFAPTLLMLLPPLLMLVLYGCWQARGWAGHQYEHHRGPGEQXAAYFQAMRFNANMSFHAQMVINEGEAFREGQRTIPAVERPGNALRQRS

SEQ ID NO: 1967 - protein, 92 aa, Homo sapiens
MGPFAPTLLMLLPPLLMLVLYGCWQARGWAGHQYEHHRGPGEQSAAYFQAMRFNANMSFHAQMVINEGEAFREGQRTIPAVERPGNALRQRS

SEQ ID NO: 1968 - protein, 124 aa, Homo sapiens
  SITE (20): Xaa equals any of the naturally occurring L-amino acids
MWPRLAFCCWGLALVSGWAXFQQMSPSRNFSFRLFPETAPGAPGSIPAPPAPGDEAAGSRVERLGQAFRRRVRLLRELNERLELASWWMIRPAWAKSTSAASSCSSASCCPTFPWWPRAPRGHS

SEQ ID NO: 1969 - protein, 230 aa, Homo sapiens
  SITE (20): Xaa equals any of the naturally occurring L-amino acids
  SITE (79): Xaa equals any of the naturally occurring L-amino acids
  SITE (165): Xaa equals any of the naturally occurring L-amino acids
MWPRLAFCCWGLALVSGWAXFQQMSPSRNFSFRLFPETAPGAPGSIPAPPAPGDEAAGSRVERLGQAFRRRVRLLRELXERLELVFLVDDSSSVGEVNFRSELMFVRKLLSDFPVVPTATRVAIVTFSSKNYVVPRVDYISTRRARQHKCALLLQEIPAISYRGXGTYTKGAFQQAAQILLHARENSTKVVFLITDGYSKGETLAQLQRHCEIQEWRSSLLAYGKGTFES

SEQ ID NO: 1970 - protein, 89 aa, Homo sapiens
MWPRLAFCCWGLALVSGWATFQQMSPSRNFSFRLFPETAPGAPGSIPAPPAPGDEAAGSRVERLGQAFRRRVRLLRELSRAPGACLPGG

SEQ ID NO: 1971 - protein, 99 aa, Homo sapiens
  SITE (6): Xaa equals any of the naturally occurring L-amino acids
  SITE (60): Xaa equals any of the naturally occurring L-amino acids
MHVKWXLIMFLICISLESNVNGYLFMCLLFGYLLWRNVYPNLLPILNFNSCLLDLELQEXFVYSKYQTFNKYMICKCFFSHAVCYSFTFLIVFFEAQTF

SEQ ID NO: 1972 - protein, 99 aa, Homo sapiens [sequence omitted]

SEQ ID NO: 1973 - protein, 153 aa, Homo sapiens
MHTHTLSLVSLSLSHSFLLSSQVTCTLGFLVEAHLPPLRGVPDCIHHNPKTRVGGNWREQNTDLILVSLLETSSPKARSLKTNLLKTCLLKVNDLMTNLPKAQFLFWCVYIHLGVLFFFVMLWIFQGFISIHPRVLLSYYQQHKFIKFAALCK

SEQ ID NO: 1974 - protein, 153 aa, Homo sapiens; identical to SEQ ID NO: 1973

SEQ ID NO: 1975 - protein, 129 aa, Homo sapiens
  SITE (99): Xaa equals any of the naturally occurring L-amino acids
  SITE (106): Xaa equals any of the naturally occurring L-amino acids
  SITE (121): Xaa equals any of the naturally occurring L-amino acids
  SITE (123): Xaa equals any of the naturally occurring L-amino acids
  SITE (127): Xaa equals any of the naturally occurring L-amino acids
MQAGKGLAQVWGVATFVQLCAHTVFLSMYLCMHICFAAISSKVRVRVNAPFCVSVPLKVHAPLSLGIKVGLQGQKHGRATGEAGMPQGEMLGKQEPQTXSSPKPTXRREVSRNELNPVIPXAXNPFXKK

SEQ ID NO: 1976 - protein, 467 aa, Homo sapiens
  SITE (151): Xaa equals any of the naturally occurring L-amino acids
  SITE (160): Xaa equals any of the naturally occurring L-amino acids
LGPAGLRRRTKRRKRGDNSTDTTQGDPLSIHHYFHGYLAGFSVRSGRLESREVIECLYACREGLDYRDFESLGKGMKVHVNPSQSLLTLEGDDVETFNHALQHVAYMNTLRFATPGVRPLRLTTAVKCFSEESCVSIPEVEGYVVVLQPDXPQILLSGTXHFARPAVDFEGTNGVPLFPDLQITCSISHQVEAKKDESWQGTVTDTRMSDEIVHNLDGCEISLVGDDLDPERESLLLDTTSLQQRGLELTNTSAYLTIAGVESITVYEEILRQARYRLRHGAALYTRKFRLSCSEMNGRYSSNEFIVEVNVLHSMNRVAHPSHVLSSQQFLHRGHQPPPEMAGHSLASSHRNSMIPSAATLIIVVCVGFLVLMVVLGLVRIHSLHRRVSGAGGPPGASSDPKDPDLFWDDSALTIIVNPMESYQNRQSCVTGAVGGQQEDEDSSDSEVADSPSSDERRIIETPPHRY

SEQ ID NO: 1977 - protein, 231 aa, Homo sapiens
  SITE (92): Xaa equals any of the naturally occurring L-amino acids
  SITE (113): Xaa equals any of the naturally occurring L-amino acids
  SITE (116): Xaa equals any of the naturally occurring L-amino acids
MQAGKGLAQVWGVATFVQLCAHTVFLSMYLCMHICFAAISSKVRVRVNAPFCVSVPLKVHAPLSLGIKVGLQGQKHGRATGEAGMPQGEMLXKQEPQTSSSPKPTRRREVSRXELXPVIPSAATLIIVVCVGFLVLMVVLGLVRIHSLHRRVSGAGGPPGASSDPKDPDLFWDDSALTIIVNPMESYQNRQSCVTGAVGGQQEDEDSSDSEVADSPSSDERRIIETPPHRY

SEQ ID NO: 1978 - protein, 145 aa, Homo sapiens
PFTFQHDCEASPATWNYLRRMTAGFMGMAVAIILFGWIIGVLGCCWDRGLMQYVAGLLFLMGGTFCIISLCTCVAGINFELSRYPRYLYGLPDDISHGYGWSMFCAWGGLGLTLISGFFCTLAPSVQPVPRTNYPKSRPENGTVC

SEQ ID NO: 1979 - protein, 125 aa, Homo sapiens
MTAGFMGMAVAIILFGWIIGVLGCCWDRGLMQYVAGLLFLMGGTFCIISLCTCVAGINFELSRYPRYLYGLPDDISHGYGWSMFCAWGGLGLTLISGFFCTLAPSVQPVPRTNYPKSRPENGTVC

SEQ ID NO: 1980 - protein, 146 aa, Homo sapiens
VPFTFQHDCEASPATWNYLRRMTAGFMGMAVAIILFGWIIGVLGCCWDRGLMQYVAGLLFLMGGTFCIISLCTCVAGINFELSRYPRYLYGLPDDISHGYGWSMFCAWGGLGLTLISGFFCTLAPSVQPVPRTNYPKSRPENGTVC

SEQ ID NO: 1981 - protein, 109 aa, Homo sapiens
  SITE (40): Xaa equals any of the naturally occurring L-amino acids
MCSMFCERLLLLCHCQLSIAVFMYWVHVTHLSSVRRINYXFLIYKKGMQLPSWYPSSCPASRKNQVTGMNGRVVNVEDFIEQWKWLSVGWGARKGLEWEDDLYLEFGHP

SEQ ID NO: 1982 - protein, 109 aa, Homo sapiens [sequence omitted]

SEQ ID NO: 1983 - protein, 109 aa, Homo sapiens; identical to SEQ ID NO: 1981
  SITE (40): Xaa equals any of the naturally occurring L-amino acids

SEQ ID NO: 1984 - protein, 108 aa, Homo sapiens
  SITE (29): Xaa equals any of the naturally occurring L-amino acids
  SITE (37): Xaa equals any of the naturally occurring L-amino acids
  SITE (99): Xaa equals any of the naturally occurring L-amino acids
GACRGSSEPGATPRPDGEPRPLPGLHCAXGMPTPLPXSPLGLRSLRRVGWPVRKGRVGRAWGWAGLCEELQPQAPPCHESKRGRGAVAHDCNPSTLGGXSGQITRSGV

SEQ ID NO: 1985 - protein, 130 aa, Homo sapiens
  SITE (37): Xaa equals any of the naturally occurring L-amino acids
MKKFSYAFLYFPSLNFTVSTWLCTALFLLHSHHLLAXCGSTFAQVCLVSESMSPFLGRLCRTSVPCAGATAFPADSDRHCNGFPAGAEVTNRPSPWRPLVLLIPLRLGLTDINEAYVETLKVGPAVRRLP

SEQ ID NO: 1986 - protein, 16 aa, Homo sapiens
PASQKAVSAWRCPAHV

SEQ ID NO: 1987 - protein, 130 aa, Homo sapiens [sequence omitted]

SEQ ID NO: 1988 - protein, 202 aa, Homo sapiens
  SITE (176): Xaa equals any of the naturally occurring L-amino acids
  SITE (181): Xaa equals any of the naturally occurring L-amino acids
  SITE (195): Xaa equals any of the naturally occurring L-amino acids
  SITE (200): Xaa equals any of the naturally occurring L-amino acids
MALSGGLRCCRRVLSWVPVLVIVLVVLWSYYAYVFELCLVTVLSPAEKVIYLILYHAIFVFFTWTYWKSIFTLPQQPNQKFHLSYTDKERYENEERPEVQKQMLVDMAKKLPVYTRTGSGAVRFCDRCHLIKPDRCHHCSVCAMCVLKMDHHCPWVNNCIGFSNYKFFLQFLAYSXLYCLXIATTVFSYFIKYWXGELPXVA

SEQ ID NO: 1989 - protein, 96 aa, Homo sapiens [sequence omitted]

SEQ ID NO: 1990 - protein, 331 aa, Homo sapiens
  SITE (176): Xaa equals any of the naturally occurring L-amino acids
MALSGGLRCCRRVLSWVPVLVIVLVVLWSYYAYVFELCLVTVLSPAEKVIYLILYHAIFVFFTWTYWKSIFTLPQQPNQKFHLSYTDKERYENEERPEVQKQMLVDMAKKLPVYTRTGSGAVRFCDRCHLIKPDRCHHCSVCAMCVLKMDHHCPWVNNCIGFSNYKFFLQFLAYSXLYCLYIATTVFSYFIKYWRGELPSVRSKFHVLFLLFVACMFFVSLVILFGYHCWLVSRNKTTLEAFCTPVFTSGPEKNGFNLGFIKNIQQVFGDKKKFWLIPIGSSPGDGHSFPMRSMNESQNPLLANEETWEDNEDDNQDYPEGSSSLAVETET

SEQ ID NO: 1991 - protein, 235 aa, Homo sapiens
  SITE (171): Xaa equals any of the naturally occurring L-amino acids
  SITE (205): Xaa equals any of the naturally occurring L-amino acids
  SITE (210): Xaa equals any of the naturally occurring L-amino acids
  SITE (221): Xaa equals any of the naturally occurring L-amino acids
MWGLLLALAAFAPAVGPALGAPRNSVLGLAQPGTTKVPGSTPALHSSPAQPPAETANGTSEQHVRIRVIKKKKVIMKKRKKLTLTRPTPLVTAGPLVTPTPAGTLDPAEKQETGCPPLGLESLRVSDSRLEASSSQSFGLGPHRGRLNIQSGLEDGDLYDGAWCAEEQDAXPWFQVDAGHPTRFLGGITQGKELLSGGEGRLTLXQEVQXGLGLGSPGGTXDLSSPFLAGMMGSH

SEQ ID NO: 1992 - protein, 197 aa, Homo sapiens
  SITE (169): Xaa equals any of the naturally occurring L-amino acids
  SITE (187): Xaa equals any of the naturally occurring L-amino acids
  SITE (194): Xaa equals any of the naturally occurring L-amino acids
MWGLLLALAAFAPAVGPALGAPRNSVLGLAQPGTTKVPGSTPALHSSPAQPPAETANGTSEQHVRIRVIKKKKVIMKKRKKLTLTRPTPLVTAGPLVTPTPAGTLDPAEKQETGCPPLGLESLRVSDSRLEASSSQSFGLGPHRGRLNIQSGLEDGDLYDGAWCAEEQXADPWFQVDAGHPTRFSGXITQGRNXVWR

SEQ ID NO: 1993 - protein, 197 aa, Homo sapiens
MWGLLLALAAFAPAVGPALGAPRNSVLGLAQPGTTKVPGSTPALHSSPAQPPAETANGTSEQHVRIRVIKKKKVIMKKRKKLTLTRPTPLVTAGPLVTPTPAGTLDPAEKQETGCPPLGLESLRVSDSRLEASSSQSFGLGPHRGRLNIQSGLEDGDLYDGAWCAEEQDADPWFQVDAGHPTRFSGVITQGRNSVWR

SEQ ID NO: 1994 - protein, 241 aa, Homo sapiens
  SITE (229): Xaa equals any of the naturally occurring L-amino acids
  SITE (230): Xaa equals any of the naturally occurring L-amino acids
  SITE (236): Xaa equals any of the naturally occurring L-amino acids
MALRLLRRAARGAAAAALLRLKASLAADIPRLGYSSSSHHKYIPRRAVLYVPGNDEKKIKKIPSLNVDCAVLDCEDGVAANKKNEARLRIVKTLEDIDLGPTEKCVRVNSVSSGLAEEDLETLLQSRVLPSSLMLPKVESPEEIQWFADKFSFHLKGRKLEQPMNLIPFVETAMGLLNFKAVCEETLKVGPQVGLFLDAVVFGGEDFRASIGATSSKETLGYSLRPAKXXCHSETXWVSKP

SEQ ID NO: 1995 - protein, 340 aa, Homo sapiens
MALRLLRRAARGAAAAALLRLKASLAADIPRLGYSSSSHHKYIPRRAVLYVPGNDEKKIKKIPSLNVDCAVLDCEDGVAANKKNEARLRIVKTLEDIDLGPTEKCVRVNSVSSGLAEEDLETLLQSRVLPSSLMLPKVESPEEIQWFADKFSFHLKGRKLEQPMNLIPFVETAMGLLNFKAVCEETLKVGPQVGLFLDAVVFGGEDFRASIGATSSKETLDILYARQKIVVIAKAFGLQAVDLVYIDFRDGAGLLRQSREGAAMGFTGKQVIHPNQIAVVQEQFSPSPEKIKWAEELIAAFKEHQQLGKGAFTFQGSMIDMPLLKQAQNTVTLATSIKEK

SEQ ID NO: 1996 - protein, 85 aa, Homo sapiens [sequence omitted]

SEQ ID NO: 1997 - protein, 95 aa, Homo sapiens
MAPPPACRSPMSPPPPLLLLLLLSLALLGARARAEPAGSAVPAQSRPCVDCHAFEFMQRALQDLRKTACSLDARTETLLLQAERRALCACWPAGH

SEQ ID NO: 1998 - protein, 84 aa, Homo sapiens
  SITE (76): Xaa equals any of the naturally occurring L-amino acids
  SITE (78): Xaa equals any of the naturally occurring L-amino acids
  SITE (79): Xaa equals any of the naturally occurring L-amino acids
  SITE (80): Xaa equals any of the naturally occurring L-amino acids
  SITE (84): Xaa equals any of the naturally occurring L-amino acids
MLCMQTVMPQHTYLQHLVFGFCLLILCINLSVLAHRYTLCYFSMTGEYSIINGQLLVYLSNLSAQWKYRYFQTLLXLXXXGVVX

SEQ ID NO: 1999 - protein, 105 aa, Homo sapiens
MLCMQTVMPQHTYLQHLVFGFCLLILCINLSVLAHRYTLCYFSMTGEYSIINGQLLVYLSNLSAQWKYRYFQTLLVLKKKKKKKKKKKKKKKKKKKKKKKKKKKK

SEQ ID NO: 2000 - protein, 108 aa, Homo sapiens
  SITE (76): Xaa equals any of the naturally occurring L-amino acids
  SITE (106): Xaa equals any of the naturally occurring L-amino acids
MLCMQTVMPQHTYLQHLVFGFCLLILCINLSVLAHRYTLCYFSMTGEYSIINGQLLVYLSNLSAQWKYRYFQTLLXLKKKKKKKKKKKKKKKKKKKKKKKKKKKKXKK

SEQ ID NO: 2001 - protein, 75 aa, Homo sapiens
  SITE (62): Xaa equals any of the naturally occurring L-amino acids
MPLAPSPVMLILVILLLFCPSFQFLPISFYSFNVYAFAFSGISPPSCLHGWLHFIQSSFFLXYSDNILVSPSLYL

SEQ ID NO: 2002 - protein, 75 aa, Homo sapiens
MPLAPSPVMLILVILLLFCPSFQFLPISFYSFNVYAFAFSGISPPSCLHGWLHFIQSSFFLLYSDNILFSPSLYL

SEQ ID NO: 2003 - protein, 147 aa, Homo sapiens
  SITE (119): Xaa equals any of the naturally occurring L-amino acids
MWLWVWLIHTLHSGLQKPRERSLPEATFQNLLHPPTDLPSPCPLFESRCQVLPADTWLLEGRCSFHLTMQACFAVGRAVLSSSQLHTGITWRVQKLPASVKEHQCISTANIPNARLDSXQLPGPPGFSSFQELSDPGSSLNVGYKLT

SEQ ID NO: 2004 - protein, 147 aa, Homo sapiens
MWLWVWLIHTLHSGLQKPRERSLPEATFQNLLHPPTDLPSPCPLFESRCQVLPADTWLLEGRCSFHLTMQACFAVGRAVLSSSQLHTGITWRVQKLPASVKEHQCISTANIPNARLDSLQLPGPPGFSSFQELSDPGSSLNVGYKLT

SEQ ID NO: 2005 - protein, 147 aa, Homo sapiens; identical to SEQ ID NO: 2004

SEQ ID NO: 2006 - protein, 127 aa, Homo sapiens
QGYFRMDSSATQFHIETHENTSGLWSIWYRNHFDRSVVLNDVFLSKETKHMLKILNFTGPLFLPPGCWNIFSLKLAVKDIAINLFTNVFLTTNIGAIFAIPLQISHCLETRVTVGMCENNWIFKQCE

SEQ ID NO: 2007 - protein, 221 aa, Homo sapiens
  SITE (25): Xaa equals any of the naturally occurring L-amino acids
  SITE (26): Xaa equals any of the naturally occurring L-amino acids
  SITE (34): Xaa equals any of the naturally occurring L-amino acids
KGTPAGTGPEFPGRPTRPGDLWPTXXVCVTSSLXCTLENGVPCVIQESAPVHNSFIDWSATCEGQFSSAYCPLELNDYNAFPEENMNYANGFPCPADVQTDFIDHNSQSTWNTPPNMPAAWGHASFISSPPYLTSTRSLSPMSGLFGSIWAPQSDVYENCCPINPTTEHSTHMENQAVVCKEYYPGFNPFRAYMNLDIWTTTANRNANFPLSRDSSYCGNV

SEQ ID NO: 2008 - protein, 166 aa, Homo sapiens
MAGLRRPQPGCYCRTAAAVNLLLGVFQVLLPCCRPGGAQGQAIEPLPNVVELWQAEEGELLLPTQGDSEEGLEEPSQEQSFSDKLFSGKGLHFQPSVLDFGIQFLGHPVAKILHAYNPSRDSEVVVNSVFAAAGHFHVPPVPCRVIPAMGKTSSELFSYLTEEGSI

SEQ ID NO: 2009 - protein, 19 aa, Homo sapiens
IPCTRPLGFPCGSNVPWWG

SEQ ID NO: 2010 - protein, 511 aa, Homo sapiens
  SITE (171): Xaa equals any of the naturally occurring L-amino acids
  SITE (358): Xaa equals any of the naturally occurring L-amino acids
  SITE (388): Xaa equals any of the naturally occurring L-amino acids
MAGLRRPQPGCYCRTAAAVNLLLGVFQVLLPCCRPGGAQGQAIEPLPNVVELWQAEEGELLLPTQGDSEEGLEEPSQEQSFSDKLFSGKGLHFQPSVLDFGIQFLGHPVAKILHAYNPSRDSEVVVNSVFAAAGHFHVPPVPCRVIPAMGKTSFRIIFLPTEEGSIESSLXINTSSYGVLSYHVSGIGTRRISTEGSAKQLPNAYFLLPKVQSIQLSQMQAETTNTSLLQVQLECSLHNKVCQQLKGCYLESDDVLRLQMSIMVTMENFSKEFEENTQHLLDHLSIVYVATDESETSDDSAVNMYILHSGNSLIWIQDIRHFSQRDALSLQFEPVLLPTSTTNFTKIASFTCKAATSXDSGIIEDVKKTTHTPTLKACLFSSVAQGYXRMDSSATQFHIETHENTSGLWSIWYRNHFDRSVVLNDVFLSKETKHMLKILNFTGPLFLPPGCWNIFSLKLAVKDIAINLFTNVFLTTNIGAIFAIPLQISHCLETRVTVGMCENNWIFKQCE

SEQ ID NO: 2011 - protein, 317 aa, Homo sapiens [sequence omitted]

SEQ ID NO: 2012 - protein, 957 aa, Homo sapiens [sequence omitted]

SEQ ID NO: 2013 - protein, 57 aa, Homo sapiens
MWWEDLMKGLFCLWPLVRSVSSLMTSSTSCPSPPTLPPWRPCLPRLRMRVLVLLIWS

SEQ ID NO: 2014 - protein, 57 aa, Homo sapiens; identical to SEQ ID NO: 2013

SEQ ID NO: 2015 - protein, 75 aa, Homo sapiens [sequence omitted]

SEQ ID NO: 2016 - protein, 42 aa, Homo sapiens
MRLSKSNQVQLFLYFLLQWSLGSVNAETSLQILLACSFTTDS

SEQ ID NO: 2017 - protein, 169 aa, Homo sapiens
MWAVLRLALRPCARASPAGPRAYHGDSVASLGTQPDLGSALYQENYKQMKALVNQLHERVEHIKLGGGEKARALHISRGKLLPRERIDNLIDPGSPFLELSQFAGYQLYDNEEVPGGGIITGIGRVSGVECMIIANDATVKGGAYYPVTVKKQLRAQEIAMQTGSPAST

SEQ ID NO: 2018 - protein, 45 aa, Homo sapiens
MVKHFTLWMVCLSLVFRKLLSLLPKKKEGQVNFFNQKKITHFIKP

SEQ ID NO: 2019 - protein, 388 aa, Homo sapiens; identical to SEQ ID NO: 1468

SEQ ID NO: 2020 - protein, 554 aa, Homo sapiens
MGPRFTMLLAMWLVCGSEPHPHATIRGSHGGRKVPLVSPDSSRPARFLRHTGRSRGIERSTLEEPNLQPLQRRRSVPVLRLARPTEPPARSDINGAAVRPEQRPAARGSPREMIRDEGSSARSRMLRFPSGSSSPNILASFAGKNRVWVISAPHASEGYYRLMMSLLKDDVYCELAERHIQQIVLFHQAGEEGGKVRRITSEGQILEQPLDPSLIPKLMSFLKLEKGKFGMVLLKKTLQVEERYPYPVRLEAMYEVIDQGPIRRIEKIRQKGFVQKCKASGVEGQVVAEGNDGGGGAGRPSQGSEKKKEDPRRAQVPPTRESRVKVLRKLAATAPAFPQPPSTPRATTLTPAPATTVTRSTSRAGNRCCKTYDHHWLSHHAEALDPLTLPTGPLQPLRVITARRPSVSRESLPSIPGRISTGRGHRQPGGPARPTSLESFTNAPPTTISEPSTRAAGPGRFRDNRMDRREHGHRDPNVVPGPPKPAKEKPPKKKAQDKILSNEYEEKYDLSRPTASQLEDELQVGNVPLKKAKESKKHEKLEKPEKEKKKKKKK

SEQ ID NO: 2021 - protein, 509 aa, Homo sapiens; identical to SEQ ID NO: 321

SEQ ID NO: 2022 - protein, 264 aa, Homo sapiens
MCLLGALVLLGLGVLLFSGGLSESETGPMEEVERQVLPDPEVLEAVGDRQDGLREQLQAPVPPDSVPSLQNMGLLLDKLAKENQDIRLLQAQLQAQKEELQSLMHQPKGLEEENAQLRGALQQGEAFQRALESELQQLRARLQGLEADCVRGPDGVCLSGGRGPQGDKAIREQGPREQEPELSFLKQKEQLEAEAQALSLEEVAVQQTGDDDEVDDFEDFIFSHFFGDKALKKRSGKKDKHSQSPRAAGPREGHSHSHHHHHRG

SEQ ID NO: 2023 - protein, 123 aa, Homo sapiens [sequence omitted]

SEQ ID NO: 2024 - protein, 57 aa, Homo sapiens
MNCVEWWKSVFLFVVLLFVTSVSCLGVVGVAVEGSLQSCSFYSLCNKRLEHVKGIFK

SEQ ID NO: 2025 - protein, 57 aa, Homo sapiens; identical to SEQ ID NO: 2024

SEQ ID NO: 2026 - protein, 92 aa, Homo sapiens
  SITE (29): Xaa equals any of the naturally occurring L-amino acids
MEIRTRVVWLCLCLCLCLCLCLSLFSLPXSLSPLPSPLSLSVSLSLSFHGLPLMPSRSWTVLLPSQLTATSLPDSPASACRVPAIAGARHHA

SEQ ID NO: 2027 - protein, 82 aa, Homo sapiens
MNRSTRSYRCWATWPRLGWALPCCMNSLRKGRKFSQITTSLMASVSSASMVSRRRRPLPKHPVTTTSTATALLGTSSTWSKS

SEQ ID NO: 2028 - protein, 46 aa, Homo sapiens
MVTASLLLLPAVMAIVFPITWAVQSQSWAAEFNGACFQVLHGKLYS

SEQ ID NO: 2029 - protein, 176 aa, Homo sapiens
MSRGDNCTDLLALGIPSITQAWGLWVLLGAVTLLFLISLAAHLSQWTRGRSRSHPGQGRSGESVEEVPLYGNLHYLQTGRLSQDPEPDQQDPTLGGPARAAEEVMCYTSLQLRPPQGRIPGPGTPVKYSEVVLDSEPKSQASGPEPELYASVCAQTRRARASFPDQAYANSQPAAS

SEQ ID NO: 2030 - protein, 168 aa, Homo sapiens
  SITE (83): Xaa equals any of the naturally occurring L-amino acids
MPLLRGLLWLQVLCAGPLHTEAVVLLVPSDDGRAFLLRSRLLHPEAHVPPAADRGASLQCVLHQAAPKSRPRSPAAGAALLHXPRRTGDEPCREFHGNGFPGPTQLTPGECGLPAPSSLLQHASAPVRTGSEGQVVGCPRARGETGEGLSLAFLSSLMFTSRNGLVGC

SEQ ID NO: 2031 - protein, 135 aa, Homo sapiens
  SITE (118): Xaa equals any of the naturally occurring L-amino acids
  SITE (121): Xaa equals any of the naturally occurring L-amino acids
MPLLRGLLWLQVLCAGPLHTEAVVLLVPSDDGRAFLLRSRLLHPEAHVPPAADRGASLQCVLHQAAPKSRPRSPAAGAALLHRPRRTGDEPCREFHGNGFPGPTQLTPGECGLPAPSXLLXHASAPVRTVCALTW

SEQ ID NO: 2032 - protein, 168 aa, Homo sapiens
  SITE (39): Xaa equals any of the naturally occurring L-amino acids
MPLLRGLLWLQVLCAGPLHTEAVVLLVPSDDGRAFLLRXRLLHPEAHVPPAADRGASLQCVLHQAAPKSRPRSPAAGAALLHRPRRTGDEPCREFHGNGFPGPTQLTPGECGLPAPSSLLQHASAPVRTGSEGQVVGCPRARGETGEGLSLAFLSSLMFTSRNGLVGC

SEQ ID NO: 2033 - protein, 134 aa, Homo sapiens
  SITE (39): Xaa equals any of the naturally occurring L-amino acids
MPLLRGLLWLQVLCAGPLHTEAVVLLVPSDDGRAFLLRXGFFIRRRMYPPPLIEEPAFNVSYTRQPPNPGPGAQQPGPPYYTDPGGPGMNPVGNSMAMAFQVPPNSPQGSVACPPPPAYCNTPPPPYEQVVKAK

SEQ ID NO: 2034 - protein, 168 aa, Homo sapiens; identical to SEQ ID NO: 2032
  SITE (39): Xaa equals any of the naturally occurring L-amino acids

SEQ ID NO: 2035 - protein, 134 aa, Homo sapiens; identical to SEQ ID NO: 2033
  SITE (39): Xaa equals any of the naturally occurring L-amino acids

SEQ ID NO: 2036 - protein, 468 aa, Homo sapiens
MGRGWGFLFGLLGAVWLLSSGHGEEQPPETAAQRCFCQVSGYLDDCTCDVETIDRFNNYRLFPRLQKLLESDYFRYYKVNLKRPCPFWNDISQCGRRDCAVKPCQSDEVPDGIKSASYKYSEEANNLIEECEQAERLGAVDESLSEETQKAVLQWTKHDDSSDNFCEADDIQSPEAEYVDLLLNPERYTGYKGPDAWKIWNVIYEENCFKPQTIKRPLNPLASGQGTSEENTFYSWLEGLCVEKRAFYRLISGLHASINVHLSARYLLQETWLEKKWGHNITEFQQRFDGILTEGEGPRRLKNLYFLYLIELRALSKVLPFFERPDFQLFTGNKIQDEENKMLLLEILHEIKSFPLHFDENSFFAGDKKEAHKLKEDFRLHFRNISRIMDCVGCFKCRLWGKLQTQGLGTALKILFSEKLIANMPESGPSYEFHLTRQEIVSLFNAFGRISTSVKELENFRNLLQNIH

SEQ ID NO: 2037 - protein, 314 aa, Homo sapiens
  SITE (227): Xaa equals any of the naturally occurring L-amino acids
MLLAQGLILHFLGRAWTWPDALNIENSDSESWTSHTVKKFTASFEASLSGEREFKTPTISLKETIGKYSDDHEMRNEVYHRKIISWFGDSPLALFGLHQLIEYGKKSGKKAGDWYGPAVVAHILRKAVEEARHPDLQGITIYVAQDCTVPVRLGGERTNTDYLEFVKGILSLEYCVGIIGGKPKQSYYFAGFQDDSLIYMDPHYCQSFVDVSIKDFPLETFHCPSPXKMSFRKMDPSCTIGFYCRNVQDFKRASEEITKMLKFSSKEKYPLFTFVNGHSRDYDFTSTTTNEEDLFSEDEKKQLKRFSTEEFVLL

SEQ ID NO: 2038 - protein, 56 aa, Homo sapiens
MRWLFVLMLSLPLPPTPRQGPACDVPLPVSHVFSLFNSHLGARTCGVWFSLPVSVC

SEQ ID NO: 2039 - protein, 414 aa, Homo sapiens [sequence omitted]

SEQ ID NO: 2040 - protein, 200 aa, Homo sapiens
MASSLTCTGVIWALLSFLCAATSCVGFFMPYWLWGSQLGKPVSFGTFRRCSYPVHDESRQMMVMVEECGRYASFQGIPSAEWRICTIVTGLGCGLLLLVALTALMGCCVSDLISRTVGRVAGGIQFLGGLLIGAGCALYPLGWDSEEVRQTCGYTSGQFDLGKCEIGWAYYCTGAGATAAMLLCTWLACFSGKKQKHYPY

SEQ ID NO: 2041 - protein, 249 aa, Homo sapiens
MIGMSTKAVLWRCFSTVVIFLFLLDEQTSLLVLVPAGVGAAIELWKVKKALKMTIFWRGLMPEFQFGTYSESERKTEEYDTQAMKYLSYLLYPLCVGGAVYSLLNIKYKSWYSWLINSFVNGVYAFGFLFMLPQLFVNYKVRRCVLPAARPPSPVLPTADLGLSLLFQLKSVAHLPWKAFTYKAFNTFIDDVFAFIITMPTSHRLACFRDDVVFLVYLYQRWLYPVDKRRVNEFGESYEEKATRAPHTD

SEQ ID NO: 2042 - protein, 249 aa, Homo sapiens; identical to SEQ ID NO: 2041

SEQ ID NO: 2043 - protein, 60 aa, Homo sapiens
MSPTGLLVVFAPVVLGLKAITLAALLLALATSRRSPGQEDVKTTGPAGAMNTLAWSKGQE

SEQ ID NO: 2044 - protein, 60 aa, Homo sapiens; identical to SEQ ID NO: 2043

SEQ ID NO: 2045 - protein, 310 aa, Homo sapiens
MALRRPPRLRLCARLPDFFLLLLFRGCLIGAVNLKSSNRTPVVQEFESVELSCIITDSQTSDPRIEWKKIQDEQTTYVFFDNKIQGDLAGRAEILGKTSLKIWNVTRRDSALYRCEVVARNDRKEIDEIVIELTVQVKPVTPVCRVPKAVPVGKMATLHCQESEGHPRPHYSWYRNDVPLPTDSRANPRFRNSSFHLNSETGTLVFTAVHKDDSGQYYCIASNDAGSARCEEQEMEVYDLNIGGIIGGVLVVLAVLALITLGICCAYRRGYFINNKQDGESYKNPGKPDGVNYIRTDEEGDFRHKSSFVI

SEQ ID NO: 2046 - protein, 310 aa, Homo sapiens; identical to SEQ ID NO: 2045

SEQ ID NO: 2047 - protein, 310 aa, Homo sapiens; identical to SEQ ID NO: 2045

SEQ ID NO: 2048 - protein, 148 aa, Homo sapiens
MHMLNGALLALLFPVVNTRLLPFELEIYYIQHVMLYVVPIYLLWKGGAYTPEPLSSFRWALLSTGLMFFYHFSVLQILGLVTEVNLNNMLCPAISDPFYGPWYRIWASGHQTLMTMTHGKLVILFSYMAGPLCKYLLDLLRLPAKKID

SEQ ID NO: 2049 - protein, 413 aa, Homo sapiens
MLKALFLTMLTLALVKSQDTEETITYTQCTDGYEWDPVRQQCKDIDECDIVPDACKGGMKCVNHYGGYLCLPKTAQIIVNNEQPQQETQPAEGTSGATTGVVAASSMATSGVLPGGGFVASAAAVAGPEMQTGRNNFVIRRNPADPQRIPSNPSHRIQCAAGYEQSEHNVCQDIDECTAGTHNCRADQVCINLRGSFACQCPPGYQKRGEQCVDIDECRTSSYLCQYQCVNEPGKFSCMCPQGYQVVRSRTCQDINECETTNECREDEMCWNYHGGFRCYPRNPCQDPYILTPENRCVCPVSNAMCRELPQSIVYKYMSIRSDRSVPSDIFQIQATTIYANTINTFRIKSGNENGEFYLRQTSPVSAMLVLVKSLSGPREHIVDLEMLTVSSIGTFRTSSVLRLTIIVGPFSF

SEQ ID NO: 2050 - protein, 683 aa, Homo sapiens
MLFIFNFLFSPLPTPALICILTFGAAIFLWLITRPQPVLPLLDLNNQSVGIEGGARKGVSQKNNDLTSCCFSDAKTMYEVFQRGLAVSDNGPCLGYRKPNQPYRWLSYKQVSDRAEYLGSCLLHKGYKSSPDQFVGIFAQNRPEWIISELACYTYSMVAVPLYDTLGPEAIVHIVNKADIAMVICDTPQKALVLIGNVEKGFTPSLKVIILMDPFDDDLKQRGEKSGIEILSLYDAENLGKEHFRKPVPPSPEDLSVICFTSGTTGDPKGAMITHQNIVSNAAAFLKCVEHAYEPTPDDVAISYLPLAHMFERIVQAVVYSCGARVGFFQGDIRLLADDMKTLKPTLFPAVPRLLNRIYDKVQNEAKTPLKKFLLKLAVSSKFKELQKGIIRHDSFWDKLIFAKIQDSLGGRVRVIVTGAAPMSTSVMTFFRAAMGCQVYEAYGQTECTGGCTFTLPGDWTSGHVGVPLACNYVKLEDVADMNYFTVNNEGEVCIKGTNVFKGYLKDPEKTQEALDSDGWLHTGDIGRWLPNGTLKIIDRKKNIFKLAQGEYIAPEKIENIYNRSQPVLQIFVHGESLRSSLVGVVVPDTDVLPSFAAKLGVKGSFEELCQNQVVREAILEDLQKIGKESGLKTFEQVKAIFLHPEPFSIENGLLTPTLKAKRGELSKYFRTQIDSLYEHIQD

SEQ ID NO: 2051 - protein, 298 aa, Homo sapiens
MAPSGPGSSARRRCRRVLYWIPVVFITLLLGWSYYAYAIQLCIVSMENTGEQVVCLMAYHLLFAMFVWSYWKTIFTLPMNPSKEFHLSYAEKDLLEREPRGEAHQEVLRRAAKDLPIYTRTMSGAIRYCDRCQLIKPDRCHHCSVCDKCILKMDHHCPWVNNCVGFSNYKFFLLFLAYSLLYCLFIAATDLQYFIKFWTNGLPDTQAKFHIMFLFFAAAMFSVSLSSLFGYHCWLVSKNKSTLEAFRSPVFRHGTDKNGFSLGFSKNMRQVFGDEKKYWLLPIFSSLGDGCSFPTLPC

SEQ ID NO: 2052 - protein, 286 aa, Homo sapiens
MAPSGPGSSARRRCRRVLYWIPVVFITLLLGWSYYAYAIQLCIVSMENTGEQVVCLMAYHLLFAMFVWSYWKTIFTLPMNPSKEFHLSYAEKDLLEREPRGEAHQEVLRRAAKDLPIYTRTMSGAIRYCDRCQLIKPDRCHHCSVCDKCILKMDHHCPWVNNCVGFSNYKFFLLFLAYSLLYCLFIAATDLQYFIKFWTNGLPDTQAKFHIMFLFFAAAMFSVSLSSLFGYHCWLVSKNKSTLEAFRSPVFRHGTDKNGFSLGFSKNMRQVLVMRRSTGCYPFFQV

SEQ ID NO: 2053 - protein, 47 aa, Homo sapiens
MSHGSQPFLLLLSLHILILAGSFLLFSPYTAKPSFSSSFIVFPRAEM

SEQ ID NO: 2054 - protein, 914 aa, Homo sapiens [sequence omitted]

SEQ ID NO: 2055 - protein, 83 aa, Homo sapiens
MASCGLTGASLPPCCCSSFLAALKSMFWGLGSLLWSLVGILSPISSCFCVYTCLTPGSSSLFPRAVTQKLEQSVPTKALWGWM

SEQ ID NO: 2056 - protein, 68 aa, Homo sapiens
MATVGLSWKKELVILLVGPGAAALQPTHTCCSLPSLSSLFPLRLNTKTSPKTTRTNLYLLSIAPLSHL

SEQ ID NO: 2057 - protein, 73 aa, Homo sapiens
MELLKCSWQLFFSFLTHCSASTIVWLFVQHRLSQSHNKPFFGILQRCHSWHLNRESFVPNQSFSIYESCSIRK

SEQ ID NO: 2058 - protein, 85 aa, Homo sapiens
MQVFFLSEIGMLWVVVKMAHSAMLVSHTQDPTPSRWPCSLAQSILLTCSPQHRFSLERKIQLPPRRWWAEGREGCWVRERVGERT

SEQ ID NO: 2059 - protein, 51 aa, Homo sapiens
MLTLTHFVSYDYFIVKRLVGWLVGWLVCFVLVSPFIHSLSTNYNFLCFMCG

SEQ ID NO: 2060 - protein, 354 aa, Homo sapiens
MAPAKATNVVRLLLGSTALWLSQLGSGTVAASKSVTAHLAAKWPETPLLLEASEFMAEESNEKFWQFLETVQELAIYKQTESDYSYYNLILKKAGQFLDNLHINLLKFAFSIRAYSPAIQMFQQIAADEPPPDGCNAFVVIHKKHTCKINEIKKLLKKAASRTRPYLFKGDHKFPTNKENLPVVILYAEMGTRTFSAFHKVLSEKAQNEEILYVLRHYIQKPSSRKMYLSGYGVELAIKSTEYKALDDTQVKTVTNTTVEDETETNEVQGFLFGKLKEIYSDLRDNLTAFQKYLIESNKQMMPLKVWELQDLSFQAASQIMSAPVYDAIKLMKDISQNFPIKARVQMIGNVLIG

SEQ ID NO: 2061 - protein, 157 aa, Homo sapiens
MQAPRAALVFALVIALVPVGRGNYEELENSGDTTVESERPNKVTIPSTFAAVTIKETLNANINSTNFAPDENQLEFILMVLIPLILLVLLLLSVVFLATYYKRKRTKQEPSSQGSQSALQTCEYYPKTCLQVGVGLEKEQRCFKIKQQGLHIIVSDK

SEQ ID NO: 2062 - protein, 67 aa, Homo sapiens
MVLGFVLLLFNMGGTFSDGRKERRRTTFLRCCDFIMKPSPALILVTSVGPVLLQNASWVSVCRTLLS

SEQ ID NO: 2063 - protein, 43 aa, Homo sapiens
MYFFFFLTFLALWVMGTTAMASPFFMGYQLQYGPQCCSGHFND

SEQ ID NO: 2064 - protein, 57 aa, Homo sapiens
MCEGWLHPIFLYCCFWTTTPSCSAFGILDLHQQHPIPTPSSWFSGLCPWTELHHCLR

SEQ ID NO: 2065 - protein, 51 aa, Homo sapiens
MIICLIMFYFIALAGAHKRVVIQLREQLSLESRDKCYLIQKLTEAQRDMRN

SEQ ID NO: 2066 - protein, 366 aa, Homo sapiens
MACLKTQRAPKAFLLLPLLLYFAGLSKLTQLQVCSGTDEDPDDKNAPFRQRPFCKYKGHTADLLDLSWSKNYFLLSSSMDKTVRLWHISRRECLCCFQHIDFVTAIAFHPRDDRYFLSGSLDGKLRLWNIPDKKVALWNEVDGQTKLITAANFCQNGKYAVIGTYDGRCIFYDTEHLKYHTQIHVRSTRGRNKVGRKITGIEPLPGENKILVTSNDSRIRLYDLRDLSLSMKYKGYVNSSSQIKASFSHDFTYLVSGSEDKYVYIWSTYHDLSKFTSVRRDRNDFWEGIKAHNAVVTSAIFAPNPSLMLSLDVQSEKSEGNEKSEDAEVLDATPSGIMKTDNTEVLLSADFTGAIKVFVNKRKNVS

SEQ ID NO: 2067 - protein, 187 aa, Homo sapiens
MVAATVAAAWLLLWAAACAQQEQDFYDFKAVNIRGKLVSLEKYRGSVSLVVNVASECGFTDQHYRALQQLQRDLGPHHFNVLAFPCNQFGQQEPDSNKEIESFARRTYSVSFPMFSKIAVTGTGAHPAFKYLAQTSGKEPTWNFWKYLVAPDGKVVGAWDPTVSVEEVRPQITALVRKLILLKREDL

SEQ ID NO: 2068 - protein, 346 aa, Homo sapiens [sequence omitted]

SEQ ID NO: 2069 - protein, 47 aa, Homo sapiens
MRLSRAAHNLQTILYSVFCLCLHVAMMDRSPSSILALWRSGSCSVEI

SEQ ID NO: 2070 - protein, 102 aa, Homo sapiens
MLLHWLLQNELQSAVASCLVSISLGKEDFLQTGCKVKSHVGVIHRREKGGAIYLPNSLVLPTSHWIRLSYRNRHRGFILWTLMSTWEARCHGPCVMFDFNQK

SEQ ID NO: 2071 - protein, 144 aa, Homo sapiens
  SITE (138): Xaa equals any of the naturally occurring L-amino acids
MVTLAELLVLLAALLATVSGYFVSIDAHAEECFFERVTSGTKMGLIFEVAEGGFLDIDVEVRASCPQLRLGRVATRGLVAPGTGAGPVWGVGLEVAVRVLEKPRPPPPAPPRPRRPPNGPFSRDLPGFRDPLGAPSAXLVALGF

SEQ ID NO: 2072 - protein, 12 aa, Homo sapiens
MGSSLAFILFLP

SEQ ID NO: 2073 - protein, 201 aa, Homo sapiens
MVTLAELLVLLAALLATVSGYFVSIDAHAEECFFERVTSGTKMGLIFEVAEGGFLDIDVEITGPDNKGIYKGDRESSGKYTFAAHMDGTYKFCFSNRMSTMTPKIVMFTIDIGEAPKGQDMETEAHQNKLEEMINELAVAMTAVKHEQEYMEVRERIHRAINDNTNSRVVLWSFFEALVLVAMTLGQIYYLKRFFEVRRVV

SEQ ID NO: 2074 - protein, 45 aa, Homo sapiens
MLSASIWLVLIISRGNARQKVKLCFLLMLLATWKRRRGRGKRGRS

SEQ ID NO: 2075 - protein, 201 aa, Homo sapiens; identical to SEQ ID NO: 2073

SEQ ID NO: 2076 - protein, 201 aa, Homo sapiens; identical to SEQ ID NO: 2073

SEQ ID NO: 2077 - protein, 587 aa, Homo sapiens
MWRLGCLIWEVFNGPLPRAAALRNPGKIPKTLVPHYCELVGANPKVRPNPARFLQNCRAPGGFMSNRFVETNLFLEEIQIKEPAEKQKFFQELSKSLDAFPEDFCRHKVLPQLLTAFEFGNAGAVVLTPLFKVGKFLSAEEYQQKIIPVVVKMFSSTDRAMRIRLLQQMEQFIQYLDEPTVNTQIFPHVVHGFLDTNPAIREQTVKSMLLLAPKLNEANLNVELMKHFARLQAKDEQGPIRCNTTVCLGKIGSYLSASTRHRVLTSAFSRATRDPFAPSRVAGVLGFAATHNLYSMNDCAQKILPVLCGLTVDPEKSVRDQAFKAIRSFLSKLESVSEDPTQLEEVEKDVHAASSPGMGGAAASWAGWAVTGVSSLTSKLIRSHPTTAPTETNIPQRPTPEGHWETQEEDKDTAEDSSTADRWDDEDWGSLEQEAESVLAQQDDWSTGGQVSRASQVSNSDHKSSKSPESDWSSWEAEGSWEQGWQEPSSQEPPPDGTRLASEYNWGGPESSDKGDPFATLSARPSTQPRPDSWGEDNWEGLETDSRQVKAELARKKREERRREMEAKRAERKVAKGPMKLGARKLD

SEQ ID NO: 2078 - protein, 124 aa, Homo sapiens
MRQVAPARRAQLEHSGLHASLCLLSLLSLLPTLEANMSGFHQAPLTLLPSCTQGDGEARGHHTQPSFWRTEMKCPVEALLEHLATRAVVGRNGDHGAQQEHRTASEGQQQPLAESSPWWQPPHG

SEQ ID NO: 2079 - protein, 74 aa, Homo sapiens [sequence omitted]

SEQ ID NO: 2080 - protein, 76 aa, Homo sapiens
MVVDLFFYLLCIFLVLWVLEAMIKHLMYSDMSALIASFSSFLNCIHYFQNRYRYSVPPFELLACSCFPLSPKQGFF

SEQ ID NO: 2081 - protein, 146 aa, Homo sapiens
MAALLLLPLLLLLPLLLLKLHLWPQLRWLPAATAARGALEKASGQRREPEMQRPEAARSLPEGTVPPEVEEPPPLCHLEQLWRCSSPLAQSFCGSGSGWPRPACALPLCPPPCAGAPCCTASAAAARARWCWRQSFWSPWSRTCPP

SEQ ID NO: 2082 - protein, 30 aa, Homo sapiens
  SITE (28): Xaa equals any of the naturally occurring L-amino acids
MRLFSQMLKSWMALFMRNVWLEMTIATXIQ

SEQ ID NO: 2083 - protein, 56 aa, Homo sapiens
MRLFSQMLKSWMALFMRNVWLEMTIATAHTVSTVHWRKWTKMLVQSPTQVKMNVSQ

SEQ ID NO: 2084 - protein, 563 aa, Homo sapiens
MGSLSNYALLQLTLTAFLTILVQPQHLLAPVFRTLSILTNQSNCWLCEHLDNAEQPELVFVPASASTWWTYSGQWMYERVWYPQAEVQNHSTSSYRKVTWHWEASMEAQGLSFAQVRLLEGNFSLCVENKNGSGPFLGNIPKQYCNQILWFDSTDGTFMPSIDVTNESRNDDDDPSVCLGTRQCSWFAGCTNRTWNSSAVPLIGLPNTQDYKWVDRNSGLTWSGNDTCLYSCQNQTKGLLYQLFRNLFCSYGLTEAHGKWRCADASITNDKGHDGHRTPTWWLTGSNLTLSVNNSGLFFLCGNGVYKGFPPKWSGRCGLGYLVPSLTRYLTLNASQITNLRSFIHKVTPHRCTQGDTDNPPLYCNPKDNSTIRALFPSLGTYDLEKAILNISKAMEQEFSATKQTLEAHQSKVSSLASASRKDHVLDIPTTQRQTACGTVGKQCCLYINYSEEIKSNIQRLHEASENLKNVPLLDWQGIFAKVGDWFRSWGYVLLIVLFCLFIFVLIYVRVFRKSRRSLNSQPLNLALSPQQSAQLLVSETSCQVSNRAMKGLTTHQYDTSLL

SEQ ID NO: 2085 - protein, 599 aa, Homo sapiens
MELLGPVPPEQQFINQKMRPGSGMLSIRVIPDGPTRALQITDFCHRKSSRSYEVDELPVTEQELQKLKNPDTEQELEVLVRLEGGIGLSLINKVPEELVFASLTGINVHYTQLATSHMLELSIQDVQVDNQLIGTTQPFMLYVTPLSNENEVIETGPAVQVNAVKFPSKSALTNIYKHLMITAQRFTVQIEEKLLLKLLSFFGYDQAESEVEKYDENLHEKTAEQGGTPIRYYFENLKISIPQIKLSVFTSNKLPLDLKALKSTLGFPLIRFEDAVINLDPFTRVHPYETKEFIINDILKHFQEELLSQAARILGSVDFLGNPMGLLNDVSEGVTGLIKYGNVGGLIRNVTHGVSNSAGKFAGTLSDGLGKTMDNRHQSEREYIRYHAATSGEHLVAGIHGLAHGIIGGLTSVITSTVEGVKTEGGVSGFISGLGKGLVGTVTKPVAGALDFASETAQAVRDTATLSGPRTQAQRVRKPRCCTGPQGLLPRYSESQAEGQEQLFKLTDNIQDEFFIAVENIDSYCVLISSKAVYFLKSGDYVDREAIFLEVKYDDLLPLPCLQRPWEGVCAGDQESREHEQWSVHPRPLPPEAHGPCEI

SEQ ID NO: 2086 - protein, 239 aa, Homo sapiens
MAPLLPSLPLHLHTSLCLRLCLSLSLSAWLSWSLPLCVSLSASYPAWRLLPQLHGRSREQRYTKLADWQYIEECVQAASPMPLFGNGDILSFEDANRAMQTGVTGIMIARGALLKPWLFTEIKEQRHWDISSSERLDILRDFTNYGLEHWGSDTQGVEKTRRFLLEWLSFLCRYVPVGLLERLPQRINERPPYYLGRDYLETLMASQKAADWIRISEMLLGPVPPSFAFLPKHKANAYK

SEQ ID NO: 2087 - protein, 127 aa, Homo sapiens [sequence omitted]

SEQ ID NO: 2088 - protein, 138 aa, Homo sapiens
MKMMVVLLMLSSLSRLLGLMRPSSLRQYLDSVPLPPCQEQQPKASAELDHKACYLCHSLLMLAGVVVSCQDITPDQWGELQLLCMQLDRHISTQIRESPQAMHRTMLKDLATQTYIRWQELLTHCQPQAQYFSPWKDI

SEQ ID NO: 2089 - protein, 132 aa, Homo sapiens [sequence omitted]

SEQ ID NO: 2090 - protein, 127 aa, Homo sapiens
  SITE (107): Xaa equals any of the naturally occurring L-amino acids
  SITE (109): Xaa equals any of the naturally occurring L-amino acids
  SITE (116): Xaa equals any of the naturally occurring L-amino acids
MFLLRPLPILLVTGGGYAGYRQYEKYRERELEKLGLEIPPKLAGHWEVALYKSVPTRLLSRAWGRLNQVELPHWLRRPVYSLYIWTFGVNMKEAAVEDLHHYRNLSXFXRRKLKAXGPACLWPAQRD

SEQ ID NO: 2091 - protein, 89 aa, Homo sapiens
  SITE (87): Xaa equals any of the naturally occurring L-amino acids
MFLLRPLPILLVTGGGYAGYRQYEKYRERELEKLGLEIPPKLAGHWEVALYKSVPTRLLSRAWGRLNQVELPHWLRRPVYSLYIWTXGG

SEQ ID NO: 2092 - protein, 90 aa, Homo sapiens [sequence omitted]

SEQ ID NO: 2093 - protein, 110 aa, Homo sapiens
  SITE (98): Xaa equals any of the naturally occurring L-amino acids
  SITE (100): Xaa equals any of the naturally occurring L-amino acids
MAAPALGLVCGRCPELGLVLLLLLLSLLCGAAGSQEAGTGAGAGSLAGSCGCGTPQRPGAHGSSAAAHRYSREANAPGPVPGERQLAHSKVLHRFLRXGXGLLGSWTGLE

SEQ ID NO: 2094 - protein, 374 aa, Homo sapiens
MAAPALGLVCGRCPELGLVLLLLLLSLLCGAAGSQEAGTGAGAGSLAGSCGCGTPQRPGAHGSSAAAHRYSREANAPGPVPGERQLAHSKMVPIPAGVFTMGTDDPQIKQDGEAPARRVTIDAFYMDAYEVSNTEFEKFVNSTGYLTEAEKFGDSFVFEGMLSEQVKTNIQQAVAAAPWWLPVKGANWRHPEGPDSTILHRPDHPVLHVSWNDAVAYCTWAGKRLPTEAEWEYSCRGGLHNRLFPWGNKLQPKGQHYANIWQGEFPVTNTGEDGFQGTAPVDAFPPNGYGLYNIVGNAWEWTSDWWTVHHSVEETLNPKGPPSGKDRVKKGGSYMCHRSYCYRYRCAARSQNTPDSSASNLGFRCAADRLPTMD

SEQ ID NO: 2095 - protein, 53 aa, Homo sapiens
MSTFVCVCVFCFVLRSEARAKRKQDQRNTKRCLLTKGQRDLSVNQSKINRTAN

SEQ ID NO: 2096 - protein, 215 aa, Homo sapiens
  SITE (7): Xaa equals any of the naturally occurring L-amino acids
MLPWTAXGLALSLRLALARSGAERGPPASAPRGDLMFLLDSSASVSHYEFSRVREFVGQLVAPLPLGTGALRASLVHVGSRPYTEFPFGQHSSGEAAQDAVRASAQRMGDTHTGLALVYAKEQLFAEASGARPGVPKVLVWVTDGGSSDPVGPPMQELKDLGVTVFIVSTGRGNFLELSAAASAPAEKHLHFVDVDDLHIIVQELRGSILDAMRP

SEQ ID NO: 2097 - protein, 127 aa, Homo sapiens
MVPGAAGWCCLVLWLPACVAAHGFRIHDYLYFQVLSPGDIRYIFTATPAKDFGGIFHTRYEQIHLVPAEPPEACGELSNGFFIQDQIALVERGGCSFLSKTRVVQEHGGRAVIISDNALTMTASTWR

SEQ ID NO: 2098 - protein, 188 aa, Homo sapiens; identical to SEQ ID NO: 1359

SEQ ID NO: 2099 - protein, 72 aa, Homo sapiens
MLVLFKFLPLTSSGRFLSVTLYHRVHHQTFFAGAKSFSPASTLNLYICSSQFQSLQKLYCGVIPVLRYASIE

SEQ ID NO: 2100 - protein, 112 aa, Homo sapiens
MAYLTLFQMGSWMSFSLSLCSLLFILTGHCLSENFYVRGDGTRAYFFTKGEVHSMFCKASLDEKQNLVDRRLQVNRKKQVKMHRVWIQGKFQKPLHQTQNSSNMVSTLLSQD

SEQ ID NO: 2101 - protein, 80 aa, Homo sapiens
MGWIDLLLPELGALRVFLHLFLVALRTKRWIFRTLGQLTCVNILGDSRKKRECRLNKRQLQFGEKTLQVPERLVVRHSPF

SEQ ID NO: 2102 - protein, 49 aa, Homo sapiens
MQVSSWVVFQLVWNSLVLTQTGIKHYFRFSLCQFLSSYNHVNQDVRTSI

SEQ ID NO: 2103 - protein, 179 aa, Homo sapiens
  SITE (143): Xaa equals any of the naturally occurring L-amino acids
MAQVLASELSLVAFILLLVMAFSKKWLDLSRSLFYQRWPVDVSNRIHTSAHVMSMGLLHFCKSRSCSDLENGKVTFIFSTLMLFPINIWIFELERNVSIPIGWSYFIGWLVLILYFTCAILCYFNHKSFWSLILSHPSGAVSXSSSFGSVEESPRAQTITDTPITQEGVLDPEQKDTHV

SEQ ID NO: 2104 - protein, 122 aa, Homo sapiens
MPPLAPQLCRAVFLVPILLLLQVKPLNGSPGPKDGSQTEKTPSADQNQEQFEEHFVASSVGEMWQVVDMAQQEEDQSSKTAAVHKHSFHLSFCFSLASVMVFSGGPLRRTFPNIQLCFMLTH

SEQ ID NO: 2105 - protein, 122 aa, Homo sapiens; identical to SEQ ID NO: 2104

SEQ ID NO: 2106 - protein, 459 aa, Homo sapiens
  SITE (321): Xaa equals any of the naturally occurring L-amino acids
  SITE (345): Xaa equals any of the naturally occurring L-amino acids
MGGPRAWALLCLGLLLPGGGAAWSIGAAPFSGRRNWCSYVVTRTISCHVQNGTYLQRVLQNCPWPMSCPGSSYRTVVRPTYKVMYKIVTAREWRCCPGHSGVSCEEVAASSASLEPMWSGSTMRRMALRPTAFSGCLNCSKVSELTERLKVLEAKMTMLTVIEQPVPPTPATPEDPAPLWGPPPAQGSPGDGGLQDQVGAWGLPGPTGPKGDAGSRGPMGMRGPPGPQGPPGSPGRAGAVGTPGERGPPGPPGPPGPPGPPAPVGPPHARISQHGDPLLSNTFTETNNHWPQGPTGPPGPPGPMGPPGPPGPTGVPGSPGXIGPPGPTGPKGISGHPGEKGEKKXLRGEPGPQGSAGQRGEPGPKGDPGEKSHWNQSWGLGGPCRHRHPQPPSGQEGGHATNYRDRGPQEPGRERLRVVAAPEADQARLPLLPGLGQLPPGTARPYLLMSSGSLLPSRP

SEQ ID NO: 2107 - protein, 615 aa, Homo sapiens [sequence omitted]

SEQ ID NO: 2108 - protein, 404 aa, Homo sapiens
  SITE (41): Xaa equals any of the naturally occurring L-amino acids
  SITE (77): Xaa equals any of the naturally occurring L-amino acids
  SITE (96): Xaa equals any of the naturally occurring L-amino acids
  SITE (98): Xaa equals any of the naturally occurring L-amino acids
  SITE (108): Xaa equals any of the naturally occurring L-amino acids
  SITE (122): Xaa equals any of the naturally occurring L-amino acids
  SITE (124): Xaa equals any of the naturally occurring L-amino acids
  SITE (126): Xaa equals any of the naturally occurring L-amino acids
  SITE (175): Xaa equals any of the naturally occurring L-amino acids
  SITE (192): Xaa equals any of the naturally occurring L-amino acids
  SITE (210): Xaa equals any of the naturally occurring L-amino acids
  SITE (236): Xaa equals any of the naturally occurring L-amino acids
  SITE (239): Xaa equals any of the naturally occurring L-amino acids
  SITE (309): Xaa equals any of the naturally occurring L-amino acids
  SITE (335): Xaa equals any of the naturally occurring L-amino acids
  SITE (389): Xaa equals any of the naturally occurring L-amino acids
MHPIPSSFMIKAVSSFLTAEEASVGNPEGAFMKVLQARKNXTSTELIVEPEEPSDSSGINLSGFGSEQLDTNDESDXISTLSYILPYFSAVNLDVXSXLLPFIKLPTXGNSLAKIQTVGQNXQXVXRVLMGPRSIQKRHFKEVGRQSIRREQGAQASVENAAEEKRLGSPAPREXEQPHTQQGPEKLAGNAXYTKPSFTQEHKAAVSVLXPFSKGAPSTSSPAKALPQVRDRWKDXTHXISILESAKARVTNMKASKPISHSRKKYRFHKTRSRMTHRTPKVKKSPKFRKKSYLSRLMLANRPPFSAAXSLINSPSQGAFSSLGDLSPQENPFLXVSAPSEHFIETTNIKDTTARNALEENVFMENTNMPEVTISENTNYNHPPEADSXGTAFNLGPTVKQTET

SEQ ID NO: 2109 - protein, 45 aa, Homo sapiens
MVTSGMLVFSIKTFSSKAFLAVVSFILVVSIKCSEGADTSRKGFS

SEQ ID NO: 2110 - protein, 45 aa, Homo sapiens; identical to SEQ ID NO: 2109

SEQ ID NO: 2111 - protein, 257 aa, Homo sapiens
MEMIIQFGFVTLFVASFPLAPLFALLNNIIEIRLDAKKFVTELRRPVAVRAKDIGIWYNILRGIGKLAVIINAFVISFTSDFIPRLVYLYMYSKNGTMHGFVNHTLSSFNVSDFQNGTAPNDPLDLGYEVQICRYKDYREPPWSENKYDISKDFWAVLAARLAFVIVFQNLVMFMSDFVDWVIPDIPKDISQQIHKEKVLMVELFMREEQDKQQLLETWMEKERQKDEPPCNHHNTKACPDSLGSPAPSHAYHGGVL

SEQ ID NO: 2112 - protein, 50 aa, Homo sapiens
MTHGCLSLASMAAGLGSVSLFLFVQQWTPTTASTGETPSSWQKTTSCVRR

SEQ ID NO: 2113 - protein, 50 aa, Homo sapiens; identical to SEQ ID NO: 2112

SEQ ID NO: 2114 - protein, 74 aa, Homo sapiens [sequence omitted]

SEQ ID NO: 2115 - protein, 94 aa, Homo sapiens
MWPWWLMVERTVVLLLITYLVPVGGSAVGPPGPGCNVSTSPPPPATRCPDESELYRDPGEAPLEADQAERGAAHEGGHPGRDPWGARRGPPRCG

SEQ ID NO: 2116 - protein, 180 aa, Homo sapiens
MAICSCQCPAAMAFCFLETLWWEFTASYDTTCIGLASRPYAFLEFDSIIQKVKWHFNYVSSSQMECSLEKIQEELKLQPPAVLTLEDTDVANGVMNGHTPMHLEPAPNFRMEPVTALGILSLILNIMCAALNLIRGVHLAEHSLQVAHEEIGNILAFLVPFVACIFQDPRSWFCWLDQTS

SEQ ID NO: 2117 - protein, 80 aa, Homo sapiens
MWPRMLAFSTWLEWLLFSPLPQSVGCPGPLEFYCVQDRRPPSLPDGADHFSSPTRITSSSISPALSLQAPEAGGFLSIPG

SEQ ID NO: 2118 - protein, 21 aa, Homo sapiens
MHDVLFFLSFSLVACVKAGML

SEQ ID NO: 2119 - protein, 291 aa, Homo sapiens
MDFIQHLGVCCLVALISVGLLSVAACWFLPSIIAAAASWIITCVLLCCSKHARCFILLVFLSCGLREGRNALIAAGTGIVILGHVENIFHNFKGLLDGMTCNLRAKSFSIHFPLLKKYIEAIQWIYGLATPLSVFDDLVSWNQTLAVSLFSPSHVLEAQLNDSKGEVLSVLYQMATTTEVLSSLGQKLLAFAGLSLVLLGTGLFMKRFLGPCGWKYENIYITRQFVQFDERERHQQRPCMLPLNKEERRKNKELKILSMILPLIYLCLNPTVSQNQNSFYLRPGFLSVLFF

SEQ ID NO: 2120 - protein, 257 aa, Homo sapiens
MDFIQHLGVCCLVALISVGLLSVAACWFLPSIIAAAASWIITCVLLCCSKHARCFILLVFLSCGLREGRNALIAAGTGIVILGHVENIFHNFKGLLDGMTCNLRAKSFSIHFPLLKKYIEAIQWIYGLATPLSVFDDLVSWNQTLAVSLFSPSHVLEAQLNDSKGEVLSVLYQMATTTEVLSSLGQKLLAFAGLSLVLLGTGLFMKRFLGPCGWKYENIYITRQFVQFDERERHQQRPCVLPLNKEERRKFISGFQS

SEQ ID NO: 2121 - protein, 257 aa, Homo sapiens; identical to SEQ ID NO: 2120

SEQ ID NO: 2122 - protein, 352 aa, Homo sapiens
  SITE (284): Xaa equals any of the naturally occurring L-amino acids
MDFIQHLGVCCLVALISVGLLSVAACWFLPSIIAAAASWIITCVLLCCSKHARCFILLVFLSCGLREGRNALIAAGTGIVILGHVENIFHNFKGLLDGMTCNLRAKSFSIHFPLLKKYIEAIQWIYGLATPLSVFDDLVSWNQTLAVSLFSPSHVLEAQLNDSKGEVLSVLYQMATTTEVLSSLGQKLLAFAGLSLVLLGTGLFMKRFLGPCGWKYENIYITRQFVQFDERERHQQRPCVLPLNKEERRKYVIIPTFWPTPKERKNLGLFFLPILIHLCIWVLXAAVDYLLYRLIFSVSKQFQSLPGFEVHLKLHGEKQGTQDIIHDSSFNISVFEPNCIPKPWQALKLLAH

SEQ ID NO: 2123 - protein, 259 aa, Homo sapiens
MVSCSILALTHLLFEFKGLMGTSTVEQLLENVCLLLASRTRDVVKSALGFIKVAVTVMDVAHLAKHVQLVMEAIGKLSDDMRRHFRMKLRNLFTKFIRKFGFELVKRLLPEEYHRVLVNIRKAEARAKRHRALSQAAVEEEEEEEEEEEPAQGKGDSIEEILADSEDEEDNEEEERSRGKEQRKLARQRSRAWLKEGGGDEPLNFLDPKVAQRVLATQPGPAGQEEGPQLQGERRWPADHKGGGRRQQDGGRGRCQRRR

SEQ ID NO: 2124 - protein, 42 aa, Homo sapiens
MLWLGTSLIFSSFSASFDGVPFLSSWLFWSSGSSPNSLIPPF

SEQ ID NO: 2125 - protein, 45 aa, Homo sapiens [sequence omitted]

SEQ ID NO: 2126 - protein, 54 aa, Homo sapiens
MWPFLHLLNMPFTLTQVVASPSSCSNWKPQHPEMPPPQIHCTHVCLCMRVCARV

SEQ ID NO: 2127 - protein, 136 aa, Homo sapiens
MLMLLTLLVLGMVWVASAIVDKNKANRESLYDFWEYYLPYLYSCISFLGVLLLLGECTGSGREWAGSLDQSNQARRKGNGGHVREGVESRVWQVTGSCPYSVYSTGSRPHVLRHWEAASQAPAAGRPGGAAVLLSL

SEQ ID NO: 2128 - protein, 74 aa, Homo sapiens
MHWTFSSSLGCLYHFSLSFSGLHTVLKSSPSSRFLLPCSSQVTQPSPVGQPRLVVQLPPVKVIGHRTGQCRGPG

SEQ ID NO: 2129 - protein, 253 aa, Homo sapiens
MDNRFATAFVIACVLSLISTIYMAASIGTDFWYEYRSPVQENSSDLNKSIWDEFISDEADEKTYNDALFRYNGTVGLWRRCITIPKNMHWYSPPERTESFDVVTKCVSFTLTEQFMEKFVDPGNHNSGIDLLRTYLWRCQFLLPFVSLGLMCFGALIGLCACICRSLYPTIATGILHLLAGLCTLGSVSCYVAGIELLHQKLELPDNVSGEFGWSFCLACVSAPLQFMASALFIWAAHTNRKEYTLMKAYRVA

SEQ ID NO: 2130 - protein, 253 aa, Homo sapiens; identical to SEQ ID NO: 2129

SEQ ID NO: 2131 - protein, 57 aa, Homo sapiens [sequence omitted]

SEQ ID NO: 2132 - protein, 41 aa, Homo sapiens [sequence omitted]

SEQ ID NO: 2133 - protein, 51 aa, Homo sapiens
MSLEPSTSSFNILLFPAFLRVFGWALGWMPWEYLYLSSKVTNGETGTQRGT

SEQ ID NO: 2134 - protein, 60 aa, Homo sapiens
  SITE (10): Xaa equals any of the naturally occurring L-amino acids
  SITE (42): Xaa equals any of the naturally occurring L-amino acids
MFFPCLPTLXLRILHSGWVGLFLLISSRAPSSSLAWKHGPGXLWWPRRPLRSCTGLASCG

SEQ ID NO: 2135 - protein, 60 aa, Homo sapiens
  SITE (10): Xaa equals any of the naturally occurring L-amino acids
  SITE (48): Xaa equals any of the naturally occurring L-amino acids
MFFPCLPTLXLRILHSGWVGLFLLISSRAPSSSLAWKHGPGELWWPRXPLRSCTGLASCG

SEQ ID NO: 2136 - protein, 78 aa, Homo sapiens
MSPHQPMQVSSSKTILWLVLSCLCPSSPHPVISGLPQWYIGVLAGIVPVAPIRPGDSGLDLQREGPQPILSQGLNRRT

SEQ ID NO: 2137 - protein, 78 aa, Homo sapiens; identical to SEQ ID NO: 2136

SEQ ID NO: 2138 - protein, 144 aa, Homo sapiens
MSAVSAPALWQTWCVPAARAWTSSTLRHDAVARPNPSTSLTPGLLTSSDSPRWPGLQEAPGRPCIRLGRSELCMYIYTYIDTFIIYTHSLYIYIHCFLAPELIWVQAHFKTLPGGGCFFSGFLAREEGEGTGWVFSLKRESRRF

SEQ ID NO: 2139 - protein, 151 aa, Homo sapiens
MLHWVLSFFFLLSCPRTEGLPGLYCPGCSQCPGRGMWPGDPGPGIQGPGLDLRTGMEATGAQQPTLSSPHCLLSLPTLPARAVQLRWDLSISRAGGRVAVLGLCLEPGGSLLLPPSALPETDPCAACPPCPFVPMSGGGGRPTVPEAGHQP

SEQ ID NO: 2140 - protein, 173 aa, Homo sapiens [sequence omitted]

SEQ ID NO: 2141 - protein, 82 aa, Homo sapiens; identical to SEQ ID NO: 2027

SEQ ID NO: 2142 - protein, 53 aa, Homo sapiens
MGQRGVFLLILDAFSVPSTASCLITPLPPPHPQPSQFFLASALQPYLGKEEWV

SEQ ID NO: 2143 - protein, 53 aa, Homo sapiens; identical to SEQ ID NO: 2142

SEQ ID NO: 2144 - protein, 53 aa, Homo sapiens; identical to SEQ ID NO: 2142

SEQ ID NO: 2145 - protein, 97 aa, Homo sapiens
MLWKLKLSRCWLDLTLLIFSQISHMDQIIFFFVVYPILNNIFSLNYCRDFFCGGYFLFCSKIIRCKAILCLTVALSKQLCSGVAFDVLEFDYMQSCI

SEQ ID NO: 2146 - protein, 122 aa, Homo sapiens
  SITE (63): Xaa equals any of the naturally occurring L-amino acids
  SITE (99): Xaa equals any of the naturally occurring L-amino acids
  SITE (122): Xaa equals any of the naturally occurring L-amino acids
MMTMTSDRWFSMAWASCSLSRPPLTPSCSCQQPATVALLLQTISVCSAQQADPLSPPRACRPXRQFPVLQSAGPPHSPHVYAFVLFPVSSRWQGGDFCXICCCFPQCLGRCLEHTRCSINPX

SEQ ID NO: 2147 - protein, 99 aa, Homo sapiens
MEGPRGWLVLCVLAISLASMVTEDLCRAPDGKKGEAGRPGRRGRPGLKGEQGEPGAPGIRTGIQGLKGDQGEPGPSGNPGKVGYPGPSGPLRSPWHPGN

SEQ ID NO: 2148 - protein, 245 aa, Homo sapiens
MEGPRGWLVLCVLAISLASMVTEDLCRAPDGKKGEAGRPGRRGRPGLKGEQGEPGAPGIRTGIQGLKGDQGEPGPSGNPGKVGYPGPSGPLGARGIPGIKGTKGSPGNIKDQPRPAFSAIRRNPPMGGNVVIFDTVITNQEEPYQNHSGRFVCTVPGYYYFTFQVLSQWEICLSIVSSSRGQVRRSLGFCDTTNKGLFQVVSGGMVLQLQQGDQVWVEKDPKKGHIYQGSEADSVFSGFLIFPSA

SEQ ID NO: 2149 - protein, 57 aa, Homo sapiens
MGHLHWGVSGNFFFPRLSLFLLFAWLQITQANEPRLPGKYSIKAIKITICITFRTSA

SEQ ID NO: 2150 - protein, 152 aa, Homo sapiens
MGVHVGAALGALWFCLTGALEVQVPEDPVVALVGTDATLCCSFSPEPGFSLAQLNLIWQLTDTKQLVHSFAEGQDQGSAYANRTALFLDLLAQGNASLRLQSVRVADEGQLHLLREHPGFRQRCRQPAGGRSLLEAQHDPGAQQGPAARGTW

SEQ ID NO: 2151 - protein, 302 aa, Homo sapiens
  SITE (128): Xaa equals any of the naturally occurring L-amino acids
MRLGSPGLLFLLFSSLRADTQEKEVRAMVGSDVELSCACPEGSRFDLNDVYVYWQTSESKTVVTYHIPQNSSLENVDSRYRNRALMSPAGMLRGDFSLRLFNVTPQDEQKFHCLVLSQSLGFQEVLSXEVTLHVAANFSVPVVSAPHSPSQDELTFTCTSINGYPRPNVYWINKTDNSLLDQALQNDTVFLNMRGLYDVVSVLRIARTPSVNIGCCIENVLLQQNLTVGSQTGNDIGERDKITENPVSTGEKNAATWSILAVLCLLVVVAVAIGWVCRDRCLQHSYAGAWAVSPETELTGHV

SEQ ID NO: 2152 - protein, 316 aa, Homo sapiens
MLRRRGSPGMGVHVGAALGALWFCLTGALEVQVPEDPVVALVGTDATLCCSFSPEPGFSLAQLNLIWQLTDTKQLVHSFAEGQDQGSAYANRTALFPDLLAQGNASLRLQRVRVADEGSFTCFVSIRDFGSAAVSLQVAAPYSKPSMTLEPNKDLRPGDTVTITCSSYQGYPEAEVFWQDGQGVPLTGNVTTSQMANEQGLFDVHSILRVVLGANGTYSCLVRNPVLQQDAHSSVTITGQPMTFPPEALWVTVGLSVCLIALLVALAFVCWRKIKQSCEEENAGAEDQDGEGEGSKTALQPLKHSDSKEDDGQEIA

SEQ ID NO: 2153 - protein, 831 aa, Homo sapiens
MKVHMHTKFCLICLLTFIFHHCNHCHEEHDHGPEALHRQHRGMTELEPSKFSKQAAENEKKYYIEKLFERYGENGRLSFFGLEKLLTNLGLGERKVVEINHEDLGHDHVSHLDILAVQEGKHFHSHNHQHSHNHLNSENQTVTSVSTKRNHKCDPEKETVEVSVKSDDKHMHDHNHRLRHHHRLHHHLDHNNTHHFHNDSITPSERGEPSNEPSTETNKTQEQSDVKLPKGKRKKKGRKSNENSEVITPGFPPNHDQGEQYEHNRVHKPDRVHNPGHSHVHLPERNGHDPGRGHQDLDPDNEGELRHTRKREAPHVKNNAIISLRKDLNEDDHHHECLNVTQLLKYYGHGANSPISTDLFTYLCPALLYQIDSRLCIEHFDKLLVEDINKDKNLVPEDEANIGASAWICGIISITVISLLSLLGVILVPIINQGCFKFLLTFLVALAVGTMSGDALLHLLPHSQGGHDHSHQHAHGHGHSHGHESNKFLEEYDAVLKGLVALGGIYLLFIIEHCIRMFKHYKQQRGKQKWFMKQNTEESTIGRKLSDHKLNNTPDSDWLQLKPLAGTDDSVVSEDRLNETELTDLEGQQESPPKNYLCIEEEKIIDHSHSDGLHTIHEHDLHAAAHNHHGENKTVLRKHNHQWHHKHSHHSHGPCHSGSDLKETGIANIAWMVIMGDGIHNFSDGLAIGAAFSAGLTGGISTSIAVFCHELPHELGDFAVLLKAGMTVKQAIVYNLLSAMMAYIGMLIGTAVGQYANNITLWIFAVTAGMFLYVALVDMLPEMLHGDGDNEEHGFCPVGQFILQNLGLLFGFAIMLVIALYEDKIVFDIQF

SEQ ID NO: 2154 - protein, 480 aa, Homo sapiens
MLFRNRFLLLLALAALLAFVSLSLQFFHLIPVSTPKNGMSSKSRKRIMPDPVTEPPVTDPVYEALLYCNIPSVAERSMEGHAPHHFKLVSVHVFIRHGDRYPLYVIPKTKRPEIDCTLVANRKPYHPKLEAFISHMSKGSGASFESPLNSLPLYPNHPLCEMGELTQTGVVQHLQNGQLLRDIYLKKHKLLPNDWSADQLYLETTGKSRTLQSGLALLYGFLPDFDWKKIYFRHQPSALFCSGSCYCPVRNQYLEKEQRRQYLLRLKNSQLEKTYGEMAKIVDVPTKQLRAANPIDSMLCHFCHNVSFPCTRNGCVDMEHFKVIKTHQIEDERERREKKLYFGYSLLGAHPILNQTIGRMQRATEGRKEELFALYSAHDVTLSPVLSALGLSEARFPRFAARLIFELWQDREKPSEHSVRILYNGVDVTFHTSFCQDHHKRSPKPMCPLENLVRFVKRDMFVALGGSGTNYYDACHREGF

SEQ ID NO: 2155 - protein, 151 aa, Homo sapiens
MFLMLGCALPIYNKYWPLFVLFFYILSPIPYCIARRLVDDTDAMSNACKELAIFLTTGIVVSAFGLPIVFARAHLMGRLPFFSKMGTAESEGRETLTQQLPLPAAAMRRLLPASRVSTQPVLRLADSAESLLGRPALWALGFLLCPPSQAQ

SEQ ID NO: 2156 - protein, 89 aa, Homo sapiens
MYMQDYWRTWLKGLRGFFFVGVLFSAVSIAAFCTFLVLAITRHQSLTDPTSYYLSSVWSFISFKWAFLLSLYAHRYRADFADISILSDF

SEQ ID NO: 2157 - protein, 56 aa, Homo sapiens
MRGHITTLLTTSFLVFGLHIIFFLNISCFNFRVFILFETRPEDSRLYRERPVLPRY

SEQ ID NO: 2158 - protein, 50 aa, Homo sapiens
MQVKNSIHVTFVARILVRVLICLSTSEAILARNHIYVVSVTNASVEVQTS

SEQ ID NO: 2159 - protein, 50 aa, Homo sapiens; identical to SEQ ID NO: 2158

SEQ ID NO: 2160 - protein, 81 aa, Homo sapiens
MRLLVLSSLLCILLLCFSIFSTEGKRRPAKAWSGRRTRLCCHRVPSPNSTNLKGHHVRLCKPCKLEPEPRLWVVPGALPQV

SEQ ID NO: 2161 - protein, 73 aa, Homo sapiens
MNITRKLWSRTFNCSVPCSDTVPVIAVSVFILFLPVVFYLSSFLHSEQKKRKLILPKRLKSSTSFANIQENSN

SEQ ID NO: 2162 - protein, 193 aa, Homo sapiens
MEPGPTAAQRRCSLPPWLPLGLLLWSGLALGALPFGSSPHRVFHDLLSEQQLLEVEDLSLSLLQGGGLGPLSLPPDLPDLDPECRELLLDFANSSAELTGCLVRSARPVRLCQTCYPLFQQVVSKMDNISRAAGNTSESQSCARSLLMADRMQIVVILSEFFNTTWQEANCANCLTNNSEELSNSTVYFLKSI

SEQ ID NO: 2163 - protein, 134 aa, Homo sapiens
MAPEVMEQVRGYDFKADIWSFGITAIELATGAAPYHKYPPMKVLMLTLQNDPPSLETGVQDKEMLKKYGKSFRKMISLCLQKDPEKRPTAAELLRHKFFQKAKNKEFLQEKTLQRAPTISERAKKVRRVPGSCP

SEQ ID NO: 2164 - protein, 334 aa, Homo sapiens
  SITE (105): Xaa equals any of the naturally occurring L-amino acids
MEPGPTAAQRRCSLPPWLPLGLLLWSGLALGALPFGSSPHRVFHDLLSEQQLLEVEDLSLSLLQGGGLGPLSLPPDLPDLDPECRELLLDFANSSAELTGCLVRXARPVRLCQTCYPLFQQVVSKMDNISRAAGNTSESQSCARSLLMADRMQIVVILSEFFNTTWQEANCANCLTNNSEELSNSTVYFLNLFNHTLTCFEHNLQGNAHSLLQTKNYSEVCKNCREAYKTLSSLYSEMQKMNELENKAEPGTHLCIDVEDAMNITRKLWSRTFNCSVPCSDTVPVIAVSVFILFLPVVFYLSSFLHSEQKKRKLILPKRLKSSTSFANIQENSN

SEQ ID NO: 2165 - protein, 49 aa, Homo sapiens
MVLVFAYLCVLLIVCWVTSKTSLALKYTVYKNFKRLIWNKSILIITLTP

SEQ ID NO: 2166 - protein, 75 aa, Homo sapiens
MSLSILVALSLQILFLFTILKCMLAKWVDFQIKCSFHKSFVMVFWSEMHFHFSFLFLLSILSFFPNKIYPGDYIC

SEQ ID NO: 2167 - protein, 86 aa, Homo sapiens [sequence omitted]

SEQ ID NO: 2168 - protein, 152 aa, Homo sapiens [sequence omitted]

SEQ ID NO: 2169 - protein, 142 aa, Homo sapiens [sequence omitted]

SEQ ID NO: 2170 - protein, 453 aa, Homo sapiens
MKLLVILIFSGLITCCGGNSSHSLPSKLLLVSFDGFRADYLQNYEFPHLQNFIKEGVLVEHVKNVFITKTFPNHYSIVTGLYEESHGIVANSMYDVITKKHFSDFDDKDPFWWNEAVPIWVTNQLQENRSSAAAMWPGTDVPIHNTTPSYFMNYSSSVSFEERLNNITMWLMNSNPPVTFATLYWEEPDASGHKYGPEDKENMYRVLKEVDDLIGELVHKLKVLGLWENLNVIITSDHGMTQCSKDKLINLDLCIDRSSYTLVDLTPVAAVLPKINTTEVYNKLKVCNPHMNVYLKEDIPARFHYQHNDRIQPIILVADEGWTIVLNKSLPKLGDHGYDNSLSSMHPFLAAHGPAFHKGYKHSTINSVDIYPMMCHILGLKPHPNNGTFGHTKCLLVDQWCINLPEAIGIVIGALLVLTTLTCLIIIMQNRLSVPRPFSRLQLQEDDDDPLIE

SEQ ID NO: 2171 - protein, 287 aa, Homo sapiens
MGALRPTLLPPSLPLLLLLMLGMGCWAREVLVPEGPLYRVAGTAVSISCNVTGYEGPAQQNFEWFLYRPEAPDTALGIVSTKDTQFSYAVFKSRVVAGEVQVQRLQGDAVVLKIARLQAQDAGIYECHTPSTDTRYLGSYSGKVELRVLPDVLQVSAAPPGPRGRQAPTSPPRMTVHEGQELALGCLARTSTQKHTHLAVSFGRSVPEAPVGRSTLQEVVGIRSDLAVEAGAPYAERLAAGELRLGKEGTDRYRMVVGGAQAGDAGTYHCTAAEWIQDPDGSWAQIA

SEQ ID NO: 2172 - protein, 613 aa, Homo sapiens
MGALRPTLLPPSLPLLLLLMLGMGCWAREVLVPEGPLYRVAGTAVSISCNVTGYEGPAQQNFEWFLYRPEAPDTALGIVSTKDTQFSYAVFKSRVVAGEVQVQRLQGDAVVLKIARLQAQDAGIYECHTPSTDTRYLGSYSGKVELRVLPDVLQVSAAPPGPRGRQAPTSPPRMTVHEGQELALGCLARTSTQKHTHLAVSFGRSVPEAPVGRSTLQEVVGIRSDLAVEAGAPYAERLAAGELRLGKEGTDRYRMVVGGAQAGDAGTYHCTAAEWIQDPDGSWAQIAEKRAVLAHVDVQTLSSQLAVTVGPGERRIGPGEPLELLCNVSGALPPAGRHAAYSVGWEMAPAGAPGPGRLVAQLDTEGVGSLGPGYEGRHIAMEKVASRTYRLRLEAARPGDAGTYRCLAKAYVRGSGTRLREAASARSRPLPVHVREEGVVLEAVAWLAGGTVYRGETASLLCNISVRGGPPGLRLAASWWVERPEDGELSSVPAQLVGGVGQDGVAELGVRPGGGPVSVELVGPRSHRLRLHSLGPEDEGVYHCAPSAWVQHADYSWYQAGSARSGPVTVYPYMHALDTLFVPLLVGTGVALVTGATVLGTITCCFMKRLRKR

SEQ ID NO: 2173 - protein, 122 aa, Homo sapiens
MWGWGSLVSARGGWGVFIYLYMGLYIVLWGMGEPAGGENPPLSPHPPGRANVKLLIFVLYIFYINISIFFLQNQFINGRGVWGGHMELPLWGGPLHYPTYRPFPHPPPHSPPPGCDCCKMGV

SEQ ID NO: 2174 - protein, 613 aa, Homo sapiens
  SITE (507): Xaa equals any of the naturally occurring L-amino acids
MGALRPTLLPPSLPLLLLLMLGMGCWAREVLVPEGPLYRVAGTAVSISCNVTGYEGPAQQNFEWFLYRPEAPDTALGIVSTKDTQFSYAVFKSRVVAGEVQVQRLQGDAVVLKIARLQAQDAGIYECHTPSTDTRYLGSYSGKVELRVLPDVLQVSAAPPGPRGRQAPTSPPRMTVHEGQELALGCLARTSTQKHTHLAVSFGRSVPEAPVGRSTLQEVVGIRSDLAVEAGAPYAERLAAGELRLGKEGTDRYRMVVGGAQAGDAGTYHCTAAEWIQDPDGSWAQIAEKRAVLAHVDVQTLSSQLAVTVGPGERRIGPGEPLELLCNVSGALPPAGRHAAYSVGWEMAPAGAPGPGRLVAQLDTEGVGSLGPGYEGRHIAMEKVASRTYRLRLEAARPGDAGTYRCLAKAYVRGSGTRLREAASARSRPLPVHVREEGVVLEAVAWLAGGTVYRGETASLLCNISVRGGPPGLRLAASWWVERPEDGELSSVPAQLVGGVGQDGVAXLGVRPGGGPVSVELVGPRSHRLRLHSLGPEDEGVYHCAPSAWVQHADYSWYQAGSARSGPVTVYPYMHALDTLFVPLLVGTGVALVTGATVLGTITCCFMKRLRKR

SEQ ID NO: 2175 - protein, 60 aa, Homo sapiens
MAWAVTLILSLSRAVRTQEVPMALQAHSGIQLASRVGLPGPWPECSTLSSRCHLSMDSKV

SEQ ID NO: 2176 - protein, 396 aa, Homo sapiens
MWWLLLWGVLQACPTRGSVLLAQELPQQLTSPGYPEPYGKGQESSTDIKAPEGFAVRLVFQDFDLEPSQDCAGDSVTISFVGSDPSQFCGQQGSPLGRPPGQREFVSSGRSLRLTFRTQPSSENKTAHLHKGFLALYQTVAVNYSQPISEASRGSEAINAPGDNPAKVQNHCQEPYYQAAAAGALTCATPGTWKDRQDGEEVLQCMPVCGRPVTPIAQNQTTLGSSRAKLGNFPWQAFTSIHGRGGGALLGDRWILTAAHTIYPKDSVSLRKNQSVNVFLGHTAIDEMLKLGNHPVHRVVVHPDYRQNESHNFSGDIALLELQHSIPLGPNVLPVCLPDNETLYRSGLLGYVSGFGMEMGWLTTELKYSRLPVAPREACNAWLQKRQRPEKKKKKK

SEQ ID NO: 2177 - protein, 172 aa, Homo sapiens
GTRTERDELLKDLQQSIAREPSAPSIPTPAYQSLPAGGHAPTPPTPAPRTMPPTKPQPPARPPPPVLPANRAPSATAPSPVGAGTAAPAPSQTPGSAPPPQAQGPPYPTYPGYPGYCQMPMPMGYNPYAYGQYNMPYPPVYHQSPGQAPYPGPQQPSYPFPQPPQQSYYPQQ

SEQ ID NO: 2178 - protein, 142 aa, Homo sapiens
  SITE (111): Xaa equals any of the naturally occurring L-amino acids
MHQLLQLQRQEPCRLLSPSPQPGLHHLCFQQIELLLLLLHLQWGLGLLRQLHHKRLAQLLLHRRRDHPIPPIQDILGIAKCPCPWAIILMRMASIICHIHQCITRVLDRLXTRDPSSLHTPSLSPHSSLTIHSSNMSAQQLS

SEQ ID NO: 2179 - protein, 868 aa, Homo sapiens
  SITE (194): Xaa equals any of the naturally occurring L-amino acids
  SITE (309): Xaa equals any of the naturally occurring L-amino acids
  SITE (550): Xaa equals any of the naturally occurring L-amino acids
MATFISVQLKKTSEVDLAKPLVKFIQQTYPSGGEEQAQYCRAAEELSKLRRAAVGRPLDKHEGALETLLRYYDQICSIEPKFPFSENQICLTFTWKDAFDKGSLFGGSVKLALASLGYEKSCVLFNCAALASQIAAEQNLDNDEGLKIAAKHYQFASGAFLHIKETVLSALSREPTVDISPDTVGTLSLIMLAXAQEVFFLKATRDKMKDAIIAKLANQAADYFGDAFKQCQYKDTLPKEVFPVLAAKHCIMQANAEYHQSILAKQQKKFGEEIARLQHAAELIKTVASRYDEYVNVKDFSDKINRALXAAKKDNDFIYHDRVPDLKDLDPIGKATLVKSTPVNVPISQKFTDLFEKMVPVSVQQSLAAYNQRKADLVNRSIAQMREATTLANGVLASLNLPAAIEDVSGDTVPQSILTKSRSVIEQGGIQTVDQLIKELPELLQRNREILDESLRLLDEEEATDNDLRAKFKERWQRTPSNELYKPLRAEGTNFRTVLDKAVQADGQVKECYQSHRDTIVLLCKPEPELNAAIPSANPAKTMQGSEVVXVLKSLLSNLDEVKKEREGLENDLKSVNFDMTSKFLTALAQDGVINEEALSVTELDRVYGGLTTKVQESLKKQEGLLKNIQVSHQEFSKMKQSNNEANLREEVLKNLATAYDNFVELVANLKEGTKFYNELTEILVRFQNKCSDIVFARKTERDELLKDLQQSIAREPSAPSIPTPAYQSLPAGGHAPTPPTPAPRTMPPTKPQPPARPPPPVLPANRAPSATAPSPVGAGTAAPAPSQTPGSAPPPQAQGPPYPTYPGYPGYCQMPMPMGYNPYAYGQYNMPYPPVYHQSPGQAPYPGPQQPSYPFPQPPQQSYYPQQ

SEQ ID NO: 2180 - protein, 102 aa, Homo sapiens
MKPATASALLLLLLGLAWTQGSHGWGADASSLQKRAGRADQPGAGWQEVAAVTSKNYNYNQHAYPTAYGGKYSVKTPAKGGVSPSSSASRVQPGLLQWVKFW

SEQ ID NO: 2181 - protein, 140 aa, Homo sapiens
  SITE (36): Xaa equals any of the naturally occurring L-amino acids
MFLFGGFLMTLFGLFVSLVFLGQAFTIMLVYVWSRXNPYVRMNFFGLLNFQAPFLPWVLMGFSLLLGNSIIVDLLGIAVGHIYFFLEDVFPNQPGGIRILKTPSILKAIFDTPDEDPNYNPLPEERPGGFAWGEGQRLGG

SEQ ID NO: 2182 - protein, 156 aa, Homo sapiens
MLEEGSFRGRTADFVFMFLFGGFLMTLFGLFVSLVFLGQAFTIMLVYVWSRRNPYVRMNFFGLLNFQAPFLPWVLMGFSLLLGNSIIVDLLGIAVGHIYFFLEDVFPNQPGGIRILKTPSILKAIFDTPDEDPNYNPLPEERPGGFAWGEGQRLGG

SEQ ID NO: 2183 - protein, 239 aa, Homo sapiens
MAYQSLRLEYLQIPPVSRAYTTACVLTTAAVQLELITPFQLYFNPELIFKHFQIWRLITNFLFFGPVGFNFLFNMIFLYRYCRMLEEGSFRGRTADFVFMFLFGGFLMTLFGLFVSLVFLGQAFTIMLVYVWSRRNPYVRMNFFGLLNFQAPFLPWVLMGFSLLLGNSIIVDLLGIAVGHIYFFLEDVFPNQPGGIRILKTPSILKAIFDTPDEDPNYNPLPEERPGGFAWGEGQRLGG

SEQ ID NO: 2184 - protein, 132 aa, Homo sapiens
MTLFGLFVSLVFLGQAFTIMLVYVWSRRNPYVRMNFFGLLNFQAPFLPWVLMGFSLLLGNSIIVDLLGIAVGHIYFFLEDVFPNQPGGIRILKTPSILKAIFDTPDEDPNYNPLPEERPGGFAWGEGQRLGG

SEQ ID NO: 2185 - protein, 339 aa, Homo sapiens
MSWSTFLLAEACGFTGVVAVLFCGITQAHYTYNNLSVESRSRTKQLFEVLHFLAENFIFSYMGLALFTFQKHVFSPIFIIGAFVAIFLGRAAHIYPLSFFLNLGRRHKIGWNFQHMMMFSGLRGAMAFALAIRDTASYARQMMFTTTLLIVFFTVWIIGGGTTPMLSWLNIRVGVDPDQDPPPNNDSFQVLQGDGPDSARGNRTKQESAWIFRLWYSFDHNYLKPILTHSGPPLTTTLPAWCGLLARCLTSPQVYDNQEPLREEDSDFILTEGDLTLTYGDSTVTANGSSSSHTASTSLEGSRRTKSSSEEVLERDLGMGDQKVSSRGTRLVFPLEDNA

SEQ ID NO: 2186 - protein, 339 aa, Homo sapiens; identical to SEQ ID NO: 2185

SEQ ID NO: 2187 - protein, 509 aa, Homo sapiens
  SITE (20): Xaa equals any of the naturally occurring L-amino acids
  SITE (168): Xaa equals any of the naturally occurring L-amino acids
  SITE (198): Xaa equals any of the naturally occurring L-amino acids
  SITE (199): Xaa equals any of the naturally occurring L-amino acids
  SITE (244): Xaa equals any of the naturally occurring L-amino acids
  SITE (246): Xaa equals any of the naturally occurring L-amino acids
  SITE (294): Xaa equals any of the naturally occurring L-amino acids
  SITE (301): Xaa equals any of the naturally occurring L-amino acids
  SITE (303): Xaa equals any of the naturally occurring L-amino acids
  SITE (493): Xaa equals any of the naturally occurring L-amino acids
  SITE (498): Xaa equals any of the naturally occurring L-amino acids
  SITE (499): Xaa equals any of the naturally occurring L-amino acids
  SITE (505): Xaa equals any of the naturally occurring L-amino acids
MEELATEKEAEESHRQDSVXLLTFILLLTLTILTIWLFKHRRVRFLHETGLAMIYGLIVGVILRYGTPATSGRDKSLSCTQEDRAFSTLLVNVSGKFFEYTLKGEISPGKINSVEQNDMLRKVTFDPEVFFNILLPPIIFHAGYSLKKRHFFRNLGSILAYAFLGTAXSCFIIGNLMYGVVKLMKIMGQLSDKFYYTXXLFFGAIISATDPVTVLAIFNELHADVDLYALLFGESVLNDAVAIXLXSSIVAYQPAGLNTHAFDAAAFFKSVGIFLGIFSGSFTMGAVTGVVTAXVTKFTKXHXFPLLETALFFLMSWSTFLLAEACGFTGVVAVLFCGITQAHYTYNNLSVESRSRTKQLFEVLHFLAENFIFSYMGLALFTFQKHVFSPIFIIGAFVAIFLGRAAHIYPLSFFLNLGRRHKIGWNFQHMMMFSGLRGAMAFALAIRDTASYARQMMFTTTLLIVFFTVWIIGGGTTPMLSWLNIRVGVDPDXDPPPXXDSFAFXTETA

SEQ ID NO: 2188 - protein, 146 aa, Homo sapiens
MTMRSLLRTPFLCGLLWAFCAPGARAEEPAASFSQPGSMGLDKNTVHDQEHIMEHLEGVINKPEAEMSPQELQLHYFKMHDYDGNNLLDGLELSTAITHVHKEEGSEQAPLMSEDELINIIDGVLRDDDKNNDGYIDYAEFAKSLQ

SEQ ID NO: 2189 - protein, 530 aa, Homo sapiens
  SITE (488): Xaa equals any of the naturally occurring L-amino acids
  SITE (490): Xaa equals any of the naturally occurring L-amino acids
  SITE (494): Xaa equals any of the naturally occurring L-amino acids
  SITE (495): Xaa equals any of the naturally occurring L-amino acids
  SITE (505): Xaa equals any of the naturally occurring L-amino acids
MEFGLTWVFLVALLRGVHCQVQLVESGGAVVQPGGSLRLSCAASGFTFSRYGMHWVRQAPGKGLQWLALVLHDGGQKYNEDVVKGRFTISRDNSNNKVYLQMDSLRGEDTATYYCVRGMWEQLPSYYFDYWGQGTLVTVSSASPTSPKVFPLSLCSTQPDGNVVIACLVQGFFPQEPLSVTWSESGQGVTARNFPPSQDASGDLYTTSSQLTLPATQCLAGKSVTCHVKHYTNPSQDVTVPCPVPSTPPTPSPSTPPTPSPSCCHPRLSLHRPALEDLLLGSEANLTCTLTGLRDASGVTFTWTPSSGKSAVQGPPDRDLCGCYSVSSVLPGCAEPWNHGKTFTCTAAYPESKTPLTATLSKSGNTFRPEVHLLPPPSEELALNELVTLTCLARGFSPKDVLVRWLQGSQELPREKYLTWASRQEPSQGTTTFAVTSILRVAAEDWKKGDTFSCMVGHEALPLAFTQKTIDRLAGKPTHVNVSVVMAXVXGPCXXAARLSPPLNXLHAPPKKKKKKKKKKKKKKKKKKKK

SEQ ID NO: 2190 - protein, 265 aa, Homo sapiens
MGGQVAGVYAAYYPSDVSSLCLVCPAGLQYSTDNQFVQRLKELQGSAAVEKIPLIPSTPEEMSEMLQLCSYVRFKVPQQILQGLVDVRIPHNNFYRKLFLEIVSEKSRYSLHQNMDKIKVPTQIIWGKQDAGAGCVWGRHVGQVNCQLPGGASGKLWALSSDGKTQEDSQAHNRLFSFCAQHRQQQEAGLRPRLQPAFCTQHLLPSPKSDAATTLRDPAPNAVGAPVTLRKPVPYPWYPRFPRALGTTRKPPRYFSQNRNSYGTK

SEQ ID NO: 2191 - protein, 99 aa, Homo sapiens
MAVWGDTELAAGVFCFFLFFCFLYLSGTWNASKTELFTPLERELKPGHPSGMLSGSHPHGAQQAKSTGLKLSLPAQQSEVDLGCSSLVWGGASAITEAL

SEQ ID NO: 2192 - protein, 144 aa, Homo sapiens
MPTTTEQPVTTTFPVTTGLKPTVALCQQKCRRTGTLEGNYCSSDFVLAGTVITTITRDGSLHATVSIINIYKEGNLAIQQAGKNMSARLTVVCKQCPLLRRGLNYIIMGQVGEDGRGKIMPNSFIMMFKTKNQKLLDALKNKQC

SEQ ID NO: 2193 - protein, 294 aa, Homo sapiens
  SITE (93): Xaa equals any of the naturally occurring L-amino acids
  SITE (97): Xaa equals any of the naturally occurring L-amino acids
MMVQMISDANTAGNGFMAMFSAAEPNERGDQYCGGLLDRPSGSFKTPNWPDRDYPAGVTCVWHIVAPKNQLIELKFEKFDVERDNYCRYDYVXVFNXGEVNDARRIGKYCGDSPPAPIVSERNELLIQFLSDLSLTADGFIGHYIFRPKKLPTTTEQPVTTTFPVTTGLKPTVALCQQKCRRTGTLEGNYCSSDFVLAGTVITTITRDGSLHATVSIINIYKEGNLAIQQAGKNMSARLTVVCKQCPLLRRGLNYIIMGQVGEDGRGKIMPNSFIMMFKTKNQKLLDALKNKQC

SEQ ID NO: 2194 - protein, 487 aa, Homo sapiens
MKHLWFFLLLVAAPRWVLSQVQLQESGPGLVKPSETLSLTCTVSGGSISSGGHYWSWIRQHPGKGLEWIGYISYNGVTYYNPSLKSRVTISVDTSQNQFSLRLSSVTAADTAVYYCAKDHRATRDGYQLEYRGFDYWGQGILVTVSSASPTSPKVFPLSLDSTPQDGNVVVACLVQGFFPQEPLSVTWSESGQNVTARNFPPSQDASGDLYTTSSQLTLPATQCPDGKSVTCHVKHYTNPSQDVTVPCPVPPPPPCCHPRLSLHRPALEDLLLGSEANLTCTLTGLRDASGATFTWTPSSGKSAVQGPPERDLCGCYSVSSVLPGCAQPWNHGETFTCTAAHPELKTPLTANITKSGNTFRPEVHLLPPPSEELALNELVTLTCLARGFSPKDVLVRWLQGSQELPREKYLTWASRQEPSQGTTTFAVTSILRVAAEDWKKGDTFSCMVGHEALPLAFTQKTIDRLAGKPTHVNVSVVMAEVDGTCY

SEQ ID NO: 2195 - protein, 189 aa, Homo sapiens [sequence omitted]

SEQ ID NO: 2196 - protein, 298 aa, Homo sapiens
MKTLQSTLLLLLLVPLIKPAPPTQQDSRIIYDYGTDNFEESIFSQDYEDKYLDGKNIKEKETVIIPNEKSLQLQKDEAITPLPPKKENDEMPTCLLCVCLSGSVYCEEVDIDAVPPLPKESAYLYARFNKIKKLTAKDFADIPNLRRLDFTGNLIEDIEDGTFSKLSLLEELSLAENQLLKLPVLPPKLTLFNAKYNKIKSRGIKANAFKKLNNLTFLYLDHNALESVPLNLPESLRVIHLQFNNIASITDDTFCKANDTSYIRDRIEEIRLEGNPIVLGKHPNSFICLKRLPIGSYF

SEQ ID NO: 2197 - protein, 298 aa, Homo sapiens; identical to SEQ ID NO: 2196

SEQ ID NO: 2198 - protein, 42 aa, Homo sapiens
MECKKRIQLIMLASIVRLPPTEQSGLLKTRFHNFCQRNLQSS

SEQ ID NO: 2199 - protein, 472 aa, Homo sapiens
MIRTRRGWSSMWPWIGVGYLAGCLVHALGEKQPELQISERDVLCVQIAGLCHDLGHGPFSHMFDGRFIPLARPEVKWTHEQGSVMMFEHLINSNGIKPVMEQYGLIPEEDICFIKEQIVGPLESPVEDSLWPYKGRPENKSFLYEIVSNKRNGIDVDKWDYFARDCHHLGIQNNFDYKRFIKFARVCEVDNELRICARDKEVGNLYDMFHTRNSLHRRAYQHKVGNIIDTMITDAFLEADDYIEITGAGGKKYRISTAIDDMEAYTKLTDNIFLEILYSTDPKLKDAREILKQIEYRNLFKYVGETQPTGQIKIKREDYESLPKEVASAKPKVLLDVKLKAEDFIVDVINMDYGMQEKNPIDHVSFYCKTAPNRAIRITKNQVSQLLPEKFAEQLIRVYCKKVDRKSLYAARQYFVQWCADRNFTKPQDGDVIAPLITPQKKEWNDSTSVQNPTRLREASKSRVQLFKDDPM

SEQ ID NO: 2200 - protein, 626 aa, Homo sapiens
  SITE (353): Xaa equals any of the naturally occurring L-amino acids
  SITE (354): Xaa equals any of the naturally occurring L-amino acids
  SITE (363): Xaa equals any of the naturally occurring L-amino acids
MQRADSEQPSKRPRCDDSPRTPSNTPSAEADWSPGLELHPDYKTWGPEQVCSFLRRGGFEEPVLLKNIRENEITGALLPCLDESRFENLGVSSLGERKKLLSYIQRLVQIHVDTMKVINDPIHGHIELHPLLVRIIDTPQFQRLRYIKQLGGGYYVFPGASHNRFEHSLGVGYLAGCLVHALGEKQPELQISERDVLCVQIAGLCHDLGHGPFSHMFDGRFIPLARPEVKWTHEQGSVMMFEHLINSNGIKPVMEQYGLIPEEDICFIKEQIVGPLESPVEDSLWPYKGRPENKSFLYEIVSNKRNGIDVDKWDYFARDCHHLGIQNNFDYKRFIKFARVCEVDNELRICARXXEVGNLYDMXHTRNSLHRRAYQHKVGNIIDTMITDAFLKADDYIEITGAGGKKYRISTAIDDMEAYTKLTDNIFLEILYSTDPKLKDAREILKQIEYRNLFKYVGETQPTGQIKIKREDYESLPKEVASAKPKVLLDVKLKAEDFIVDVINMDYGMQEKNPIDHVSFYCKTAPNRAIRITKNQVSQLLPEKFAEQLIRVYCKKVDRKSLYAARQYFVQWCADRNFTKPQDGDVIAPLITPQKKEWNDSTSVQNPTRLREASKSRVQLFKDDPM

SEQ ID NO: 2201 - protein, 245 aa, Homo sapiens
  SITE (128): Xaa equals any of the naturally occurring L-amino acids
MEGPRGWLVLCVLAISLASMVTEDLCRAPDGKKGEAGRPGRRGRPGLKGEQGEPGAPGIRTGIQGLKGDQGEPGPSGNPGKVGYPGPSGPLGARGIPGIKGTKGSPGNIKDQPRPAFSAIRRNPPMGXNVVIFDTVITNQEEPYQNHSGRFVCTVPGYYYFTFQVLSQWEICLSIVSSSRGQVRRSLGFCDTTNKGLFQVVSGGMVLQLQQGDQVWVEKDPKKGHIYQGSEADSVFSGFLIFPSA

SEQ ID NO: 2202 - protein, 32 aa, Homo sapiens
MGVNKVLFTFFFFSSLLDGVGTSHSLASFPHT

SEQ ID NO: 2203 - protein, 245 aa, Homo sapiens; identical to SEQ ID NO: 2148

SEQ ID NO: 2204 - protein, 245 aa, Homo sapiens; identical to SEQ ID NO: 2148

SEQ ID NO: 2205 - protein, 245 aa, Homo sapiens; identical to SEQ ID NO: 2148

SEQ ID NO: 2206 - protein, 245 aa, Homo sapiens; identical to SEQ ID NO: 2148

SEQ ID NO: 2207 - protein, 229 aa, Homo sapiens
  SITE (47): Xaa equals any of the naturally occurring L-amino acids
  SITE (49): Xaa equals any of the naturally occurring L-amino acids
MEGPRGWLVLCVLAISLASMVTEDLCRAPDGKKGEAGRPGRRGRPGXKXLKGDQGEPGPSGNPGKVGYPGPSGPLGARGIPGIKGTKGSPGNIKDQPRPAFSAIRRNPPMGGNVVIFDTVITNQEEPYQNHSGRFVCTVPGYYYFTFQVLSQWEICLSIVSSSRGQVRRSLGFCDTTNKGLFQVVSGGMVLQLQQGDQVWVEKDPKKGHIYQGSEADSVFSGFLIFPSA

SEQ ID NO: 2208 - protein, 207 aa, Homo sapiens
  SITE (75): Xaa equals any of the naturally occurring L-amino acids
  SITE (77): Xaa equals any of the naturally occurring L-amino acids
  SITE (112): Xaa equals any of the naturally occurring L-amino acids
MDVGPSSLPHLGLKLLLLLLLLPLRGQANTGCYGIPGMPGLPGAPGKDGYDGLPGPKGEPGIPAIPGIRGPKGQXGXAEIPVSVHGHSADPPAPCTQQPDQIQRGPHQPAEXYDTSTGKFTCKVPGLYYFVYHASHTANLCVLLYRSGVKVVTFCGHTSKTNQVNSGGVLLRLQVGEEVWLAVNDYYDMVGIQGSDSVFSGFLLFPD

SEQ ID NO: 2209 - protein, 235 aa, Homo sapiens
MDMRVPAQLLGLLLLWLRGARCDMQMTQSPSSLSASVGDRVTITCRTSQSIGKFLNWYQQKPGQAPKLLISGASILQTGVPSRFSGSGSATYFTLTINDLHPEDSATYYCQQDYTTPLFGQGTKVEIKRTVAAPSVFIFPPSDEQLKSGTASVVCLLNNFYPREAKVQWKVDNALQSGNSQESVTEQDSKDSTYSLSSTLTLSKADYEKHKVYACEVTHQGLSSPVTKSFNRGEC

SEQ ID NO: 2210 - protein, 234 aa, Homo sapiens
  SITE (120): Xaa equals any of the naturally occurring L-amino acids
MRVPAQLLGLLLLWLSGARCDIQLTQSPSSLSASLGDSVTITCQASQDIANYLNWYQQKPGKPPKLVIFDGSILHTGVPSRFSGGGSGTHFTFTINNLQPDDVATYSCQQYNTFPLTFGXGTKVEIKRTVAAPSVFIFPPSDEQLKSGTASVVCLLNNFYPREAKVQWKVDNALQSGNSQESVTEQDSKDSTYSLSSTLTLSKADYEKHKVYACEVTHQGLSSPVTKSFNRGEC

SEQ ID NO: 2211 - protein, 206 aa, Homo sapiens
MDVGPSSLPHLGLKLLLLLLLLPLRGQANTGCYGIPGMPGLPGAPGKDGYDGLPGPKGEPGIPAIPGIRGPKGRYKQKFQSVFTVTRQTHQPPAPNSLIRFNAVLTNPQGDYDTSTGKFTCKVPGLYYFVYHASHTANLCVLLYRSGVKVVTFCGHTSKTNQVNSGGVLLRLQVGEEVWLAVNDYYDMVGIQGSDSVFSGFLLFPD

SEQ ID NO: 2212 - protein, 208 aa, Homo sapiens
MDVGPSSLPHLGLKLLLLLLLLPLRGQANTGCYGIPGMPGLPGAPGKDGYDGLPGPKGEPGIPAIPGIRGPKGQKGEPGLPGHPGKNGPMGPPGMPGVPGPMGIPGEPGEEGRYKQKFQSVFTVTRQTHQPPAPNSLIRFNAVLTNPQEIMTRALASSPAKSPASTTLSTTRRIQPTCACCCTAAASKWSPSVATRPKPIRSTRAVCC

SEQ ID NO: 2213 - protein, 263 aa, Homo sapiens
  SITE (27): Xaa equals any of the naturally occurring L-amino acids
  SITE (112): Xaa equals any of the naturally occurring L-amino acids
MCLLGGLSAPPLLLLPLLPLLLCPPTXQGDCSFPPELPNAIQSVGDQQSFPEKFTVTYKCKEGFVKVPGKADSVVCLNNKWSEVAEFCNRSCDVPTRLQFASLKKSFTKQNXFPVGSVVEYECRPGYQRDHLLSGKLTCLLNFTWSKPDEFCKRKSCPNPGDLRHGHVNIPTDILYAAVIHFSCNKGYRLVGAASSYCSIVNDDVGWSDPLPECQEIFCPEPPKISNGVILDQQNTYVYQQAVKYECIKGFTLIGENSDLLYC

SEQ ID NO: 2214 - protein, 55 aa, Homo sapiens
MCLLGGLSAPPLLLLPLLPLLLCPPTGRVTAAFPQSYLMPYKVWVTNRVFLKNSQ

SEQ ID NO: 2215 - protein, 350 aa, Homo sapiens
  SITE (3): Xaa equals any of the naturally occurring L-amino acids
  SITE (4): Xaa equals any of the naturally occurring L-amino acids
MAXXVVLLALVAGVLGNEFSILKSPGSVVFRNGNWPIPGERIPDVAALSMGFSVKEDLSWPGLAVGNLFHRPRATVMVMVKGVNKLALPPGSVISYPLENAVPFSLDSVANSIHSLFSEETPVVLQLAPSEERVYMVGKANSVFEDLSVTLRQLRNRLFQENSVLSSLPLNSLSRNNEVDLLFLSELQVLHDISSLLSRHKHLAKDHSPDLYSLELAGLDEIGKRYGEDSEQFRDASKILVDALQKFADDMYSLYGGNAVVELVTVKSFDTSLIRKTRTILEAKQAKNPASPYNLAYKYNFEYSVVFNMVLWIMIALALAVIITSYNIWNMDPGYDSIIYRMTNQKIRMD

SEQ ID NO: 2216 - protein, 350 aa, Homo sapiens
MAVFVVLLALVAGVLGNEFSILKSPGSVVFRNGNWPIPGERIPDVAALSMGFSVKEDLSWPGLAVGNLFHRPRATVMVMVKGVNKLALPPGSVISYPLENAVPFSLDSVANSIHSLFSEETPVVLQLAPSEERVYMVGKANSVFEDLSVTLRQLRNRLFQENSVLSSLPLNSLSRNNEVDLLFLSELQVLHDISSLLSRHKHLAKDHSPDLYSLELAGLDEIGKRYGEDSEQFRDASKILVDALQKFADDMYSLYGGNAVVELVTVKSFDTSLIRKTRTILEAKQAKNPASPYNLAYKYNFEYSVVFNMVLWIMIALALAVIITSYNIWNMDPGYDSIIYRMTNQKIRMD

SEQ ID NO: 2217 - protein, 167 aa, Homo sapiens
  SITE (61): Xaa equals any of the naturally occurring L-amino acids
  SITE (79): Xaa equals any of the naturally occurring L-amino acids
MCSLFHAFIFAQLWTVYCEQSAVATNLQNQNEFSFTAILTALEFWSRVTPSILQLMAHNKXMVEMVCLHVISLMEALQXCNSTIFVKLIPMWLPMIQSNIKHLSAGLQLRLQAIQNHVNHHSLRTLPGSGQSSAGLAALRKWLQCTQFKMAQVEIQSSEAASQFYPL

SEQ ID NO: 2218 - protein, 110 aa, Homo sapiens
MEFPGADGCNQVDAEYLKVGSEGHFRVPALGYLDVRIVDTDYSSFAVLYIYKELEGALSTMVQLYSRTQDVSPQALKAFQDFYPTLGLPEDMMVMLPQSDACNPESKEAP

SEQ ID NO: 2219 - protein, 115 aa, Homo sapiens
  SITE (101): Xaa equals any of the naturally occurring L-amino acids
  SITE (106): Xaa equals any of the naturally occurring L-amino acids
ISLLWNLWQSVKIGCGEKLYPGHTKDSRNHLGQNLSFLHFIYLFPPPHSTHTLPTSSTSTFKHKDVRVFSLSVSWRTGCWERKGQMSKGGCRAGQADSGGXLEELXPSQTWVSKT

SEQ ID NO: 2220 - protein, 262 aa, Homo sapiens
  SITE (254): Xaa equals any of the naturally occurring L-amino acids
MECCRRATPGTLLLFLAFLLLSSRTARSEEDRDGLWDAWGPWSECSRTCGGGASYSLRRCLSSKSCEGRNIRYRTCSNVDCPPEAGDFRAQQCSAHNDVKHHGQFYEWLPVSNDPDNPCSLKCQAKGTTLVVELAPKVLDGTRCYTESLDMCISGLCQIVGCDHQLGSTVKEDNCGVCNGDGSTCRLVRGQYKSQLSATKSDDTVVAIPYGSRHIRLVLKGPDHLYLETKTLQGTKGENSLSSTGTFLVDNSSXTSRNFQTK

SEQ ID NO: 2221 - protein, 514 aa, Homo sapiens
ELCRQPKPSTVQACNRFNCPPAWYPAQWQPCSRTCGGGVQKREVLCKQRMADGSFLELPETFCSASKPACQQACKKDDCPSEWLLSDWTECSTSCGEGTQTRSAICRKMLKTGLSTVVNSTLCPPLPFSSSIRPCMLATCARPGRPSTKHSPHIAAARKVYIQTRRQRKLHFVVGGFAYLLPKTAVVLRCPARRVRKPLITWEKDGQHLISSTHVTVAPFGYLKIHRLKPSDAGVYTCSAGPAREHFVIKLIGGNRKLVARPLSPRSEEEVLAGRKGGPKEALQTHKHQNGIFSNGSKAEKRGLAANPGSRYDDLVSRLLEQGGWPGELLASWEAQDSAERNTTSEEDPGAEQVLLHLPFTMVTEQRRLDDILGNLSQQPEELRDLYSKHLVAQLAQEIFRSHLEHQDTLLKPSERRTSPVTLSPHKHVSGFSSSLRTSSTGDAGGGSRRPHRKPTILRKISAAQQLSASEVVTHLGQTVALASGTLSVFCTVRPSATQGLPSAGPGMEKKSVQ

SEQ ID NO: 2222 - protein, 1745 aa, Homo sapiens
MECCRRATPGTLLLFLAFLLLSSRTARSEEDRDGLWDAWGPWSECSRTCGGGASYSLRRCLSSKSCEGRNIRYRTCSNVDCPPEAGDFRAQQCSAHNDVKHHGQFYEWLPVSNDPDNPCSLKCQAKGTTLVVELAPKVLDGTRCYTESLDMCISGLCQIVGCDHQLGSTVKEDNCGVCNGDGSTCRLVRGQYKSQLSATKSDDTVVAIPYGSRHIRLVLKGPDHLYLETKTLQGTKGENSLSSTGTFLVDNSSVDFQKFPDKEILRMAGPLTADFIVKIRNSGSADSTVQFIFYQPIIHRWRETDFFPCSATCGGGYQLTSAECYDLRSNRVVADQYCHYYPENIKPKPKLQECNLDPCPARWEATPWTACSSSCGGGIQSRAVSCVEEDIQGHVTSVEEWKCMYTPKMPIAQPCNIFDCPKWLAQEWSPCTVTCGQGLRYRVVLCIDHRGMHTGGCSPKTKPHIKEECIVPTPCYKPKEKLPVEAKLPWFKQAQELEEGAAVSEEPSFIPKAWSACTVTCGVGTQVRIVRCQVLLSFSQSVADLPIDECEGPKPASQRACYAGPCSGEIPEFNPDETDGLFGGLQDFDELYDWEYEGFTKCSESCGGGVQEAVVSCLNKQTREPAEENLCVTSRRPPQLLKSCNLDPCPARWEIGKWSPCSLTCGVGLQTRDVFCSHLLSREMNETVILADELCRQPKPSTVQACNRFNCPPAWYPAQWQPCSRTCGGGVQKREVLCKQRMADGSFLELPETFCSASKPACQQACKKDDCPSEWLLSDWTECSTSCGEGTQTRSAICRKMLKTGLSTVVNSTLCPPLPFSSSIRPCMLATCARPGRPSTKHSPHIAAARKVYIQTRRQRKLHFVVGGFAYLLPKTAVVLRCPARRVRKPLITWEKDGQHLISSTHVTVAPFGYLKIHRLKPSDAGVYTCSAGPAREHFVIKLIGGNRKLVARPLSPRSEEEVLAGRKGGPKEALQTHKHQNGIFSNGSKAEKRGLAANPGSRYDDLVSRLLEQGGWPGELLASWEAQDSAERNTTSEEDPGAEQVLLHLPFTMVTEQRRLDDILGNLSQQPEELRDLYSKHLVAQLAQEIFRSHLEHQDTLLKPSERRTSPVTLSPHKHVSGFSSSLRTSSTGDAGGGSRRPHRKPTILRKISAAQQLSASEVVTHLGQTVALASGTLSVLLHCEAIGHPRPTISWARNGEEVQFSDRILLQPDDSLQILAPVEADVGFYTCNATNALGYDSVSIAVTLAGKPLVKTSRMTVINTEKPAVTVDIGSTIKTVQGVNVTINCQVAGVPEAEVTWFRNKSKLGSPHHLHEGSLLLTNVSSSDQGLYSCRAANLHGELTESTQLLILDPPQVPTQLEDIRALLAATGPNLPSVLTSPLGTQLVLDPGNSALLGCPIKGHPVPNITWFHGGQPIVTATGLTHHILAAGQILQVANLSGGSQGEFSCLAQNEAGVLMQKASLVIQDYWWSVDRLATCSASCGNRGVQQPRLRCLLNSTEVNPAHCAGKVRPAVQPIACNRRDCPSRWMVTSWSACTRSCGGGVQTRRVTCQKLKASGISTPVSNDMCTQVAKRPVDTQACNQQLCVEWAFSSWGQCNGPCIGPHLAVQHRQVFCQTRDGITLPSEQCSALPRPVSTQNCWSEACSVHWRVSLWTLCTATCGNYGFQSRRVECVHARTNKAVPEHLCSWGPRPANWQRCNITPCENMECRDTTRYCEKVKQLKLCQLSQFKSRCCGTCGKA

SEQ ID NO: 2223 - protein, 19 aa, Homo sapiens
ECCETAAPPGPHRRPESGQ

SEQ ID NO: 2224 - protein, 363 aa, Homo sapiens
MAAVLTWALALLSAFSATQARKGFWDYFSQTSGDKGRVEQIHQQKMAREPATLKDSLEQDLNNMNKFLEKLRPLSGSEAPRLPQDPVGMRRQLQEELEEVKARLQPYMAEAHELVGWNLEGLRQQLKPYTMDLMEQVALRVQELQEQLRVVGEDTKAQLLGGVDEAWALLQGLQSRVVHHTGRFKELFHPYAESLVSGIGRHVQELHRSVAPHAPASPARLSRCVQVLSRKLTLKAKALHARIQQNLDQLREELIRAFAGTGTEEGAGPDPQMLSEEVRQRLQAFRQDTYLQIAAFTRAIDQETEEVQQQLAPPPPGHSAFAPEFQQTDSGKVLSKLQARLDDLWEDITHSLHDQGHSHLGDP

SEQ ID NO: 2225 - protein, 183 aa, Homo sapiens
  SITE (86): Xaa equals any of the naturally occurring L-amino acids
  SITE (146): Xaa equals any of the naturally occurring L-amino acids
MAVGKFLLGSLLLLSLQLGQGWGPDARGVPVADGEFSSEQVAKAGGTWLGKDFQGPSVTSQLSPALTLLTVSALPSHRHPPPPCPXAPSPVWSMPAVEPDPVRGRARPGLRLIGEVIFRYCAGSCPRGARTQHGLALARLQGQGRXHGGPCCRPTRYTDVAFLDDRHAGSGCPSSRRLCGCGG

SEQ ID NO: 2226 - protein, 252 aa, Homo sapiens
  SITE (86): Xaa equals any of the naturally occurring L-amino acids
  SITE (116): Xaa equals any of the naturally occurring L-amino acids
  SITE (135): Xaa equals any of the naturally occurring L-amino acids
  SITE (146): Xaa equals any of the naturally occurring L-amino acids
MAVGKFLLGSLLLLSLQLGQGWGPDARGVPVADGEFSSEQVAKAGGTWLGKDFQGPSVTSQLSPALTLLTVSALPSHRHPPPPCPXAPSPVWSMPAVEPDPVRGRARPGLRLIGEXHLPLLRRQLPPWCPHPAWXGAGPAAGPGPXPRRALLPAHSLHRRGLPRRPPRWQRLPQLSAALRLWWLRVPGLAPRSCSAGGARLTYLLETWMQRQRGGEWAGATSSECNKGHHSPGKKKKKKKKKKKKLEGGSRY

SEQ ID NO: 2227 - protein, 150 aa, Homo sapiens [sequence omitted]

SEQ ID NO: 2228 - protein, 125 aa, Homo sapiens
MIPFPACLLLALFPKVQVGRTTSAYFSTIPSMPARSQINLPVESGSALLEPRGKGRVERVCPVAWSSMVASCLPSPSSGGPEGSLGTVPQILTQGPAWGRDGCRQNALYRDFLLLGRCVSPTICL

SEQ ID NO: 2229 - protein, 766 aa, Homo sapiens
MIWRSRAGAELFSLMALWEWIALSLHCWVLAVAAVSDQHATSPFDWLLSDKGPFHRSQEYTDFVDRSRQGFSTRYKIYREFGRWKVNNLAVERRNFLGSPLPLAPEFFRNIRLLGRRPTLQQITENLIKKYGTHFLLSATLGGEESLTIFVDKRKLSKRAEGSDSTTNSSSVTLETLHQLAASYFIDRDSTLRRLHHIQIASTAIKVTETRTGPLGCSNYDNLDSVSSVLVQSPENKIQLQGLQVLLPDYLQERFVQAALSYIACNSEGEFICKENDCWCHCGPKFPECNCPSMDIQAMEENLLRITETWKAYNSDFEESDEFKLFMKRLPMNYFLNTSTIMHLWTMDSNFQRRYEQLENSMKQLFLKAQKIVHKLFSLSKRCHKQPLISLPRQRTSTYWLTRIQSFLYCNENGLLGSFSEETHSCTCPNDQVVCTAFLPCTVGDASACLTCAPDNRTRCGTCNTGYMLSQGLCKPEVAESTDHYIGFETDLQDLEMKYLLQKTDRRIEVHAIFISNDMRLNSWFDPSWRKRMLLTLKSNKYKSSLVHMILGLSLQICLTKNSTLEPVLAVYVNPFGGSHSESWFMPVNENSFPDWERTKLDLPLQCYNWTLTLGNKWKTFFETVHIYLRSRIKSNGPNGNESIYYEPLEFIDPSRNLGYMKINNIQVFGYSMHFDPEAIRDLILQLDYPYTQGSQDSALLQLLEIRDRVNKLSPPGQRRLDLFSCLLRHRLKLSTSEVVRIQSALQAFNAKLPNTMDYDTTKLCS

SEQ ID NO: 2230 - protein, 61 aa, Homo sapiens; identical to SEQ ID NO: 580

SEQ ID NO: 2231 - protein, 133 aa, Homo sapiens
MRMSLAQRVLLTWLFTLLFLIMLVLKLDEKAPWNWFLIFIPVWIFDTILLVLLIVKMAGRCKSGFDPRHGSHNIKKKAWYLIAMLLKLAFCLALCAKLEQFTTMNLSYVFIPLWALLAGALTELGYNVFFVRD

SEQ ID NO: 2232 - protein, 131 aa, Homo sapiens [sequence omitted]

SEQ ID NO: 2233 - protein, 298 aa, Homo sapiens; identical to SEQ ID NO: 2196

SEQ ID NO: 2234 - protein, 158 aa, Homo sapiens; identical to SEQ ID NO: 1633

SEQ ID NO: 2235 - protein, 58 aa, Homo sapiens
MTKALIPTPFFLAAMWPLWQHSWAQTLRSQRQEADAWAKAGAGNSRGSLAWRLLMSSG

SEQ ID NO: 2236 - protein, 71 aa, Homo sapiens
MLVAAIVFISFGVVAAFCCAIVDGVFAAQHIEPKAPHHGKMPVYSSGVGYLYDVYQTEVSRSTEIHVGLLN

SEQ ID NO: 2237 - protein, 605 aa, Homo sapiens
MGRLLRAARLPPLLSPLLLLLVGGAFLGACVAGSDEPGPEGLTSTSLLDLLLPTGLEPLDSEEPSETMGLGAGLGAPGSGFPSEENEESRILQPPQYFWEEEEELNDSSLDLGPTADYVFPDLTEKAGSIEDTSQAQELPNLPSPLPKMNLVEPPWHMPPREEEEEEEEEEEREKEEVEKQEEEEEEELLPVNGSQEEAKPQVRDFSLTSSSQTPGATKSRHEDSGDQASSGVEVESSMGPSLLLPSVTPTTVTPGDQDSTSQEAEATVLPAAGLGVEFEAPQEASEEATAGAAGLSGQHEEVPALPSFPQTTAPSGAEHPDEDPLGSRTSASSPLAPGDMELTPSSATLGQEDLNQQLLEGQAAEAQSRIPWDSTQVICKDWSNLAGKNYIILNMTENIDCEVFRQHRGPQLLALVEEVLPRHGSGHHGAWHISLSKPSEKEQHLLMTLVGEQGVVPTQDVLSMLGDIRRSLEEIGIQNYSTTSSCQARASQVRSDYGTLFVVLVVIGAICIIIIALGLLYNCWQRRLPKLKHVSHGEELRFVENGCHDNPTLDVASDSQSEMQEKHPSLNGGGALNGPGSWGALMGGKRDPEDSDVFEEDTHL

SEQ ID NO: 2238 - protein, 432 aa, Homo sapiens
MDARWWAVVVLAAFPSLGAGGETPEAPPESWTQLWFFRFVVNAAGYASFMVPGYLLVQYFRRKNYLETGRGLCFPLVKACVFGNEPKASDEVPLAPRTEAAETTPMWQALKLLFCATGLQVSYLTWGVLQERVMTRSYGATATSPGERFTDSQFLVLMNRVLALIVAGLSCVLCKQPRHGAPMYRYSFASLSNVLSSWCQYEALKFVSFPTQVLAKASKVIPVMLMGKLVSRRSYEHWEYLTATLISIGVSMFLLSSGPEPRSSPATTLSGLILLAGYIAFDSFTSNWQDALFAYKMSSVQMMFGVNFFSCLFTVGSLLEQGALLEGTRFMGRHSEFAAHALLLSICSACGQLFIFYTIGQFGAAVFTIIMTLRQAFAILLSCLLYGHTVTVVGGLGVAVVFAALLLRVYARGRLKQRGKKAVPVESPVQKV

SEQ ID NO: 2239 - protein, 432 aa, Homo sapiens; identical to SEQ ID NO: 2238

SEQ ID NO: 2240 - protein, 69 aa, Homo sapiens
MKAVVLLKAFSFSLCSAISPVTPGFRQTINVLDTVAFSAFFIYLFTVTASINFYAYFSSFLAGAPFIKI

SEQ ID NO: 2241 - protein, 57 aa, Homo sapiens [sequence omitted]

SEQ ID NO: 2242 - protein, 145 aa, Homo sapiens
MLRTLVLKQTLDLLLPLLEALLVLGVPQHLELQPLPVQVSLLLLQLLDLGSLKSHRLHHFHSKALQLPVLDHLDFQDFQLPWQQVLSELPVAPAFGGGSSVAGFGSPGLTFSHWLFLSHPVDTFGNSQAYPTSLSALQASINCNR

SEQ ID NO: 2243 - protein, 77 aa, Homo sapiens
MAICQFFLQGRCRFGDRCWNEHPGARGAGGGRQQPQQQPSGNNRRGWNTTSQRYSNVIQPSSFSKSTPWGGSRDQET

SEQ ID NO: 2244 - protein, 86 aa, Homo sapiens [sequence omitted]

SEQ ID NO: 2245 - protein, 208 aa, Homo sapiens; identical to SEQ ID NO: 732

SEQ ID NO: 2246 - protein, 215 aa, Homo sapiens
MRLPAWCRHTTLAISCWHCLVLARASADSASLPTISHLGVKPLSVGWGAPSTLPVSPCGGKPAAPTSASPAAAPLRFWRPGASGGGAGGTRRLALCRLVTARTTLATGTPGLSARPRQRPCLLPVLPRRPAELSVSLEPSPGSSGRGFLCLPFCKRDADTSLGQTLTSSCSLSSILVGGTLRPRCSCPPFTQRSAFHLRTPHNQYHHGSTSLASH

SEQ ID NO: 2247 - protein, 139 aa, Homo sapiens; identical to SEQ ID NO: 726

SEQ ID NO: 2248 - protein, 363 aa, Homo sapiens
MKTLLLLVGLLLTWENGRVLGDQMVSDTELQEMSTEGSKYINREIKNALKGVKQIKTLIEQTNEERKSLLTNLEEAKKKKEDALNDTKDSEMKLKASQGVCNDTMMALWEECKPCLKQTCMKFYARVCRSSTGLVGHQVEEFLNQSSPFYFWINGDRIDSLLENDRQQTHALDVMQDSFDRASSIMDELFQDRFFTREAQDPFHFSPFSSFQRRPFFFNIKHRFARNIMPFPGYQPLNFHDMFQPFFDMIHQAQQAMDVNLHRLPHFPMEFTEEDNQDGAVCKEIRHNSTGCLKMKDQCEKCREILSVDCSSNNPAQVQLRQELNNSLQIAEKFTKLVRRAAAVLPGEDVQHVLPAEAAGRAV

SEQ ID NO: 2249 - protein, 85 aa, Homo sapiens [sequence omitted]

SEQ ID NO: 2250 - protein, 184 aa, Homo sapiens; identical to SEQ ID NO: 347

SEQ ID NO: 2251 - protein, 352 aa, Homo sapiens [sequence omitted]

SEQ ID NO: 2252 - protein, 448 aa, Homo sapiens
MAWASRLGLLLALLLPVVGASTPGTVVRLNKAALSYVSEIGKAPLQRALQVTVPHFLDWSGEALQPTRIRILNVHVPRLHLKFIAGFGVRLLAAANFTFKVFRAPEPLELTLPVELLADTRVTQSSIRTPVVSISACSLFSGHANEFDGSNSTSHALLVLVQKHIKAVLSNKLCLSISNLVQGVNVHLGTLIGLNPVGPESQIRYSMVSVPTVTSDYISLEVNAVLFLLGKPIILPTDATPFVLPRHVGTEGSMATVGLSQQLFDSALLLLQKAGALNLDITGQLRSDDNLLNTSALGRLIPEVARQFPEPMPVVLKVRLGATPVAMLHTNNATLRLQPFVEVLATASNSAFQSLFSLDVVVNLRLQLSVSKVKLQGTTSVLGDVQLTVASSNVGFIDTDQVRTLMGTVFEKPLLDHLNALLAMGIALPGVVNLHYVPLRSLSMRATW

SEQ ID NO: 2253 - protein, 183 aa, Homo sapiens
MEPEEGTPLWRLQKLPAELGPQLLHKIIDGICGRAYPVYQDYHTVWESEEWMHVLEDIAKFFKAIVGKNLPDEEIFQQLNQLNSLHQETIMKCVKSRKDEIKQALSREIVAISSAQLQDFDWQVKLALSSDKIAALRMPLLSLHLDVKENGEVKPYSIEMSREELQNLIQSLEAANKVVLQLK

SEQ ID NO: 2254 - protein, 121 aa, Homo sapiens
MPCGRQHLQNLDDAVNGSAWTILLLTENFLRDTWCNFQFYTSLMNSVNRQHKYNSVIPMRPLNNPLPRERTPFALQTINALEEESRGFPTQVERIFQESVYKTQQTIWKETRNMVQRQFIA

SEQ ID NO: 2255 - protein, 251 aa, Homo sapiens
MLFHYDWISIPLVYTQVVTIAVYSFFALSLVGRQFVEPEAGAAKPQKLLKPGQEPAPALGDPDMYVPLTTLLQFFFYAGWLKVAEQIINPFGEDDDDFETNQLIDRNLQVSLLSVDEMYQNLPPAEKDQYWDEDQPQPPYTVATAAESLRPSFLGSTFNLRMSDDPEQSLQVEASPGSGRPAPAAQTPLLGRFLGVGAPSPAISLRNFGRVRGTPRPPHLLRFRAEEGGDPEAAARIEEESAESGDEALEP

SEQ ID NO: 2256 - protein, 125 aa, Homo sapiens
MRPGKKVLVMGIVDLNPESFAISLTCGDSEDPPADVAIELKAVFTDRQLLRNSCISGERGEEQSAIPYFPFIPDQPFRVEILCEHPRFRVFVDGHQLFDFYHRIQTLSAIDTIKINGDLQITKLG

SEQ ID NO: 2257 - protein, 170 aa, Homo sapiens
MISIHNEEENAFILDTLKKQWKGPDDILLGMFYDTDDASFKWFDNSNMTFDKWTDQDDDEDLVDTCAFLHIKTGEWKKGNCEVSSVEGTLCKTAIPYKRKYLSDNHILISALVIASTVILTVLGAIIWFLYKKHSDSRFTTVFSTAPQSPYNEDCVLVVGEENEYPVQFD

SEQ ID NO: 2258 - protein, 595 aa, Homo sapiens
MLLLLLLLPPLLCGRVGAKEQKDYLLTMQKSVTVQEGLCVSVLCSFSYPQNGWTASDPVHGYWFRAGDHVSRNIPVATNNPARAVQEETRDRFHLLGDPQNKDCTLSIRDTRESDAGTYVFCVERGNMKWNYKYDQLSVNVTASQDLLSRYRLEVPESVTVQEGLCVSVPCSVLYPHYNWTASSPVYGSWFKEGADIPWDIPVATNTPSGKVQEDTHGRFLLLGDPQTNNCSLSIRDARKGDSGKYYFQVERGSRKWNYIYDKLSVHVTALTHMPTFSIPGTLESGHPRNLTCSVPWACEQGTPPTITWMGASVSSLDPTITRSSMLSLIPQPQDHGTSLTCQVTLPGAGVTMTRAVRLNISYPPQNLTMTVFQGDGTASTTLRNGSALSVLEGQSLHLVCAVDSNPPARLSWTWGSLTLSPSQSSNLGVLELPRVHVKDEGEFTCRAQNPLGSQHISLSLSLQNEYTGKMRPISGVTLGAFGGAGATALVFLYFCIIFVVVRSCRKKSARPAVGVGDTGMEDANAVRGSASQGPLIESPADDSPPHHAPPALATPSPEEGEIQYASLSFHKARPQYPQEQEAIGYEYSEINIPK

SEQ ID NO: 2259 - protein, 274 aa, Homo sapiens
MSSNGIPECYAEEDEFSGLETDTAVPTEEAYVIYDEDYEFETSRPPTTTEPSTTATTPRVIPEEGAISSFPEEEFDLAGRKRFVAPYVTYLNKDPSAPCSLTDALDHFQVDSLDEIIPNDLKKSDLPPQHAPRNITVVAVEGCHSFVIVDWDKATPGDVVTGYLVYSASYEDFIRNKWSTQASSVTHLPIENLKPNTRYYFKVQAQNPHGYGPISPSVSFVTESDNPLLVVRPPGGEPIWIPFAFKHDPSYTDCHGRQYVKRTLVSKVRGSWSL

SEQ ID NO: 2260 - protein, 468 aa, Homo sapiens
MPALHTLNLDHNLIDALPPGAFAQLGQLSRLDLTSNRLATLAPDPLFSRGRDAEASPAPLVLSFSGNPLHCNCELLWLRRLARPDDLETCASPPGLAGRYFWAVPEGEFSCEPPLIARHTQRLWVLEGQRATLRCRALGDPAPTMHWVGPDDRLVGNSSRARAFPNGTLEIGATGAGDAGGYTCIATNPAGEATARVELRVLALPHGGNSSAEGGRPGPSDIAASARTAAEGEGTLESEPAVQVTEVTATSGLVSWGPGRPADPVWMFQIQYNSSEDETLIYRIVPASSHHFLLKHLVPGADYDLCLLALSPAAGPSDLTATRLLGCAHFSTLPASPLCHALQAHVLGGTLTVAVGGVLVAALLVFTVALLVRGRGAGNGRLPLKLSHVQSQTNGGPSPTPKAHPPRSPPPRPQRSCSLDLGDAGCYGYARRLGGAWARRSHSVHGGLLGAGCRGVGGSAERLEESVV

SEQ ID NO: 2261 - protein, 86 aa, Homo sapiens [sequence omitted]

SEQ ID NO: 2262 - protein, 105 aa, Homo sapiens
MKGSRALLLVALTLFCICRMATGEDNDEFFMDFLQTLLVGTPEELYEGTLGKYNVNEDAKAAMTELKSCIDGLQPMHKAELVKLLVQVLGSQDGAGTDYKDDDDK

SEQ ID NO: 2263 - protein, 167 aa, Homo sapiens
MAASVCSGLLGPRVLSWSRELPCAWRALHTSPVCAKNRAARVRVSKGDKPVTYEEAHAPHYIAHRKGWLSLHTGNLDGEDHAAERTVEDVFLRKFMWGTFPGCLADQLVLKRRGNQLEICAVVLRQLSPHKYYFLVGYSETLLSYFYKCPVRLHLQTVPSKVVYKYL

SEQ ID NO: 2264 - protein, 203 aa, Homo sapiens
MARPRPREYKAGDLVFAKMKGYPHWPARIDELPEGAVKPPANKYPIFFFGTHETAFLGPKDLFPYKEYKDKFGKSNKRKGFNEGLWEIENNPGVKFTGYQAIQQQSSSETEGEGGNTADASSEEEGDRVEEDGKGKRKNEKAGSKRKKSYTSKKSSKQSRKSPGDEDDKDCKEEENKSSSEGGDAGNDTRNTTSDLQKTSEGT

SEQ ID NO: 2265 - protein, 253 aa, Homo sapiens
MRSGKMAPKPQSRCTSTRSAGEAPSENQSPSKGPEEASSEVQDTNEVHVPGDQDEPQTLGKKGSKNNISVYMTLNQKKSDSSSASVCSIDSTDDLKSSNSECSSSESFDFPPGSMHAPSTSSTSSSSKEEKKLSNSLKMKVFSKNVSKCVTPDGRTICVGDIVWAKIYGFPWWPARILTITVSRKDNGLLVRQEARISWFGSPTTSFLALSQLSPFLENFQSRFNKKRKGLYRKAITEAAKAAKQLTPEVRAC

SEQ ID NO: 2266 - protein, 314 aa, Homo sapiens
MPHAFKPGDLVFAKMKGYPHWPARIDDIADGAVKPPPNKYPIFFFGTHETAFLGPKDLFPYDKCKDKYGKPNKRKGFNEGLWEIQNNPHASYSAPPPVSSSDSEAPEANPADGSDADEDDEDRGVMAVTAVTATAASDRMESDSDSDKSSDNSGLKRKTPALKMSVSKRARKASSDLDQASVSPSEEENSESSSESEKTSDQDFTPEKKAAVRAPRRGPLGGRKKKKAPSASDSDSKADSDGAKPEPVAMARSASSSSSSSSSSDSDVSVKKPPRGRKPTEKPLPKPRGRKPKPERPPSSSSSDSDSDEVDRIT

SEQ ID NO: 2267 - protein, 281 aa, Homo sapiens
MGSRGQGLLLAYCLLLAFASGLVLSRVPHVQGEQQEWEGTEELPSPPDHAERAEEQHEKYRPSQDQGLPASRCLRCCDPGTSMYPATAVPQINITILKGEKGDRGDRGLQGKYGKTGSAGARGHTGPKGQKGSMGAPGERCKSHYAAFSVGRKKPMHSNHYYQTVIFDTEFVNLYDHFNMFTGKFYCYVPGLYFFSLNVHTWNQKETYLHIMKNEEEVAILFAQVGDRSIMQSQSLMLELREQDQVWVRLYKGERENAIFSEELDTYITFSGYLVKHATEP
